(19) United States
(12) Patent Application Publication
(10) Pub. No.: US 2023/0312753 A1
(43) Pub. Date: Oct. 5, 2023

(54) PRECURSOR TRI-SPECIFIC ANTIBODY CONSTRUCTS AND METHODS OF USE THEREOF

(71) Applicant: Immunorizon Ltd., Rehovot (IL)

(72) Inventors: Oren BOGIN, Tel-Aviv (IL); Liat DASSA, Tel Aviv (IL)

(73) Assignee: Immunorizon Ltd., Rehovot (IL)

(21) Appl. No.: 17/922,366

(22) PCT Filed: May 4, 2021
(86) PCT No.: PCT/IL2021/050506

§ 371 Date: Oct. 30, 2022

Related U.S. Application Data
(60) Provisional application No. 63/026,143, filed on May 18, 2020.
(60) Provisional application No. 63/019,443, filed on May 4, 2020.

(51) Int. Cl. C12N 15/63; C07K 16/46; A61P 35/00

(52) U.S. Cl. CPC C07K 16/468; A61P 35/00; C12N 15/63; C07K 2317/31; C07K 2317/51; C07K 2317/515; C07K 2317/55; C07K 2317/565; C07K 2317/622

(57) ABSTRACT

Disclosed herein are precursor tri- specific antibody constructs comprising (i) a first binding domain that binds to a tumor associated antigen, (ii) a second binding domain that binds to a first natural killer (NK) cell surface antigen, and (iii) a third binding domain that binds to a T cell surface antigen or a second NK cell surface antigen. The antibody constructs further comprises regulatory domains that regulate binding to the T cell or NK cell surface antigen. Pharmaceutical compositions comprising the precursor constructs and their uses for treating tumors are also disclosed.

### FIELD OF THE INVENTION

[0001] The present disclosure relates generally to the field of antibody construct. In one embodiment, disclosed herein are precursor tri-specific antibody constructs and methods of using the same (e.g. treatment of cancer).

### SEQUENCE LISTING STATEMENT

[0002] The instant application contains a Sequence Listing which has been submitted electronically in ASCII format and is hereby incorporated by reference in its entirety. Said ASCII copy, created on Apr. 29, 2021, is named P-594180-PC_SL.txt and is 1,730,884 bytes in size.

### BACKGROUND OF THE INVENTION

[0003] The functionality of monoclonal antibodies (non conjugated or naked antibody) currently approved by drug regulatory agencies worldwide for clinical use in oncology setting are known to use one or a combination of the following mechanisms: 1) blocking cell growth signaling, 2) blocking blood supply to cancer cells, 3) directly mediating cell apoptosis, 4) eliciting immunological effector functions such as antibody dependent cellular cytoxicity (ADCC), antibody dependent cellular phagocytosis (ADCP) and complement dependent cytotoxicity (CDC), and 5) promoting adaptive immunity towards tumors.

[0004] Monoclonal antibody therapies have demonstrated survival benefits in the clinic. However, the overall response rates in cancer patients are low, and the survival benefits are marginal (several months) compared to chemotherapy. Although the underlying reasons for the lack of robust clinical anti-cancer activities are not fully understood, research has suggested that cancer cells often quickly develop compensating signaling pathways to escape cell death. Also, cancer stem cells (CSC), which are considered as potent cancer initiating cells, are less active at cell proliferation therefore they tend to sustain the lack of growth signal better.

[0005] In an attempt to improve anti-tumor activity of monoclonal antibodies, multi-specific antibodies are being developed. In contrast to classical monoclonal antibodies, which are the standard first-line therapy in several tumor entities, these multi-specific antibodies may bring together a tumor cell and the means to destroy the tumor cell, thereby increasing the efficiency of treatment. These multi-specific antibodies provide for new treatment options for cancer patients.

[0006] Another anti-cancer therapeutic approach is to utilize T cells. T cells provide defense against cancer throughout life by patrolling the body in search for newly arisen cancer cells and eliminating them effectively and promptly. Therapeutic approaches utilizing T cells have proved successful in cancer treatment of at least metastatic melanoma, metastatic kidney cancer, asymptomatic metastatic hormone refractory prostate cancer, and advanced melanoma.

[0007] While the use of targeting activated T cells provides one pathway for destruction of tumor cells, another pathway of cellular cytotoxicity is through the recruitment and targeting of nature killer (NK) cells. NK cells are white blood cells, part of the innate immune system that plays a major role in the host-rejection of tumors. NK cells are cytotoxic, wherein small granules in their cytoplasm contain special proteins such as perforin and proteases known as granzymes. Upon release in close proximity to a tumor cell slated for killing, perforin forms pores in the cell membrane of the targeted cell through which the granzymes and associated molecules can enter, inducing apoptosis. Therapeutic antibodies, such as RITUXAN and HERCEPTIN, can drive killing of bound tumors through NK-cell-mediated antibody-dependent cell-mediated cytotoxicity (ADCC).

[0008] Tumor escape from NK cell immune surveillance predominantly occurs via two mechanisms: reduction of activating signals or increases in inhibitory signals delivered to NK cells. Thus, another potential target of cancer immunotherapy is the removal/blocking of molecules that suppress NK activation, and removal/blocking of molecules that result in NK cell hypo-responsiveness. Restoring NK cell antitumor activity is critical for establishing host immunity against cancer, which is a primary objective of cancer immunotherapy.

[0009] Another consideration in tumor cytotoxicity is the tumor microenvironment (TME). The TME includes novel targets that can help direct and improve the actions of antibody therapies by potentiating host antitumor immune responses. For example, T cells play an unexpectedly critical role in anti-tumor antigen antibody therapy, although their importance is often not observed due to studies being performed in immunodeficient mice. IL-2 treatment was shown to amplify monoclonal antibody therapy not simply via the previously assumed NK-mediated ADCC, but also by boosting the CD8+ T cell adaptive response, since IL-2 exerts significant pleiotropic effects on regulatory, helper, and cytolytic memory T-cells (Liao et al., Immunity. 2013, 38:13) (Zhu EF et.al Cancer Cell. 2015 27:489).

[0010] A pitfall of antibody therapeutics used in cancer treatment is the “off-target” binding of the antibody to non-cancer tumor-associated-antigen-expressing cells, especially if such binding leads to cytotoxicity. Thus, “off-target” binding by multi-specific and bispecific antibodies presents a potential challenge to controlling their “off-target” activity against normal tissues that also express the antigen, even at extremely low levels. These “off-target” effects are a serious limitation to multi-specific and bispecific antibody therapeutics. Another drawback of many bispecific or multi-specific antibodies is their short half-life.

[0011] There remains a need to provide multi-specific trivalent antibodies with qualities that specifically target cytotoxicity to tumor cells while reducing the toxic side effects and preserving the antibodies effectiveness.

### SUMMARY OF THE INVENTION

[0012] Reducing the non-specific toxic side effects of multi-specific antibodies and concurrently enhancing the effectiveness of these antibodies require an antibody having a precursor form that (1) engages a target associated with a tumor cell, a tumor-associated cell, or a tumor cell environment, and (2) activates cytotoxic cells, for example T cells or NK cells, once localized within or adjacent to the tumor microenvironment (TME). Further, it is essential that such multi-specific antibodies do not reduce significantly the immunogenicity to a tumor or tumor-associated target. In one embodiment, the precursor tri-specific antibody constructs described herein addresses these needs by attaching a regulatable half-life enhancing component and a blocking component that inhibits the antibody from engaging a toxicity-providing cell prior to binding to a tumor or tumor-associated target or at the TME. Further, the tri-specific antibodies presented herein may concurrently engage two different types of cytotoxic cells (e.g. T cells and NK cells).

[0013] In one embodiment, after the precursor tri-specific antibody constructs described herein are administered to a cancer patient, the precursor antibody constructs eventually reach the tumor-associated targets or the TME. At the vicinity of the tumor-associated targets or the TME, the precursor antibody constructs would bind to a tumor-associated antigen, and the blocking component(s) that inhibits the antibody from engaging T cells and/or NK cells would be removed by proteases present at the TME. Subsequently, the antibody constructs (now in “active” form) would bind to T cells and/or NK cells, thereby recruiting T cells and/or NK cells from the circulation to the tumor-associated targets or the TME.

[0014] In one embodiment, disclosed herein is a precursor tri-specific antibody construct, comprising: a) a first binding domain that binds to a tumor associated antigen (TAA); b) a second binding domain comprising a cytokine receptor engager or a second binding domain that binds to a first natural killer (NK) cell surface antigen; c) a third binding domain that binds to a T cell surface antigen or a second NK cell surface antigen; and d) a regulatory domain comprising either (i) a first and a second sub-regulatory domain, the first sub-regulatory domain comprising a first protease cleavage domain and a half-life prolonging (HLP) domain, and the second sub-regulatory domain comprising a second protease cleavage domain and a CAP component that reduces the ability of the third binding domain to bind to its target antigen; or (ii) a single regulatory domain comprising a protease cleavage domain, a half-life prolonging (HLP) domain, and a CAP component that reduces the ability of the third binding domain to bind to its target antigen.

[0015] In one embodiment, when the second binding domain binds to a NK cell surface antigen, the second binding domain further comprises a third regulatory domain comprising a third protease cleavage domain and a CAP component that reduces the ability of the second binding domain to bind to the NK cell surface antigen.

[0016] In one embodiment, the first binding domain, the second binding domain each comprises a single chain variable fragment (scFv). In one embodiment, the third binding domain comprises a Fab antigen binding fragment.

[0017] In one embodiment, the T cell surface antigen is CD3. In another embodiment, one or both of the NK cell surface antigens bound by the antibody construct disclosed herein can be an activating NK cell receptor or an inhibitory NK cell receptor. It is known in the art that activation of the NK cells is mediated by a network of activating and inhibitory receptors; it is the integration of the activating and inhibitory signals that determines if the NK cells become cytotoxic (see e.g. Chester et al., Frontiers in Immunology, 2015, 6:Article 601). Activating receptors for NK cells include, but are not limited to, CD16, TRAIL, NKG2D, 2B4, DNAM-1, NKp30, NKp44, NKp46 and NKp80. Inhibitory receptors for NK cells include, but are not limited to, KIR (killer cell immunoglobulin-like receptor) and CD94/NKG2A heterodimer. Moreover, there are co-stimulatory proteins with key roles in regulating the activation of NK cells, for example, CD137, OX40 and CD27. In another embodiment, one or both of the NK cell surface antigens bound by the antibody construct disclosed herein can be, but is not limited to, CD16 (FcγRIII), CD16a (FcγRIIIa), CD56, sMICA/B, ILT, SLAMF7, NKp44, NKp30, DNAM-1, NKG2A, NKG2D, NKG2C/CD94, NKp46, KIR2/DL3, KIR2DL1, NKRP1, NKG2E/CD94, NKG2F/CD94, CD69, LLT1, ILT2, AICL, CD26, NKp80, KIR family receptors, or CD122/IL-2Rbeta.

[0018] In one embodiment, the second binding domain and the third binding domain bind to different NK cell surface antigens. In another embodiment, the second binding domain and the third binding domain bind to the same NK cell surface antigen. In one embodiment, the second binding domain binds to NKG2A and the third binding domain binds to NKG2D. In another embodiment, the second binding domain binds to NKG2D and the third binding domain binds to NKG2A.

[0019] In one embodiment of the precursor tri-specific antibody construct, the first binding domain binds to a TAA, the second binding domain binds to a NK cell surface antigen, and the third binding domain binds to a T cell surface antigen.

[0020] In one embodiment of the precursor tri-specific antibody construct, the first binding domain binds to a TAA, the second binding domain binds to a NK cell surface antigen, and the third binding domain binds to a T cell surface antigen, wherein the second binding domain further comprises a third regulatory domain comprising a third protease cleavage domain and a CAP component that reduces the ability of the second binding domain to bind to the NK cell surface antigen.

[0021] In one embodiment of the precursor tri-specific antibody construct, the first binding domain binds to a TAA, the second binding domain binds to a first NK cell surface antigen, and the third binding domain binds to a second NK cell surface antigen.

[0022] In one embodiment of the precursor tri-specific antibody construct, the first binding domain binds to a TAA, the second binding domain binds to a first NK cell surface antigen, and the third binding domain binds to a second NK cell surface antigen, wherein the second binding domain further comprises a third regulatory domain comprising a third protease cleavage domain and a CAP component that reduces the ability of the second binding domain to bind to the NK cell surface antigen.

[0023] In one embodiment of the precursor tri-specific antibody construct, the first binding domain binds to a TAA, the cytokine receptor engager of the second binding domain comprises a cytokine that binds to a cytokine receptor, and the third binding domain binds to a NK cell surface antigen. In one embodiment, the cytokine is a pro-inflammatory cytokine. In another embodiment, the cytokine is an anti-inflammatory cytokine. In one embodiment, the cytokine can be IL-15, IL-2, IL-12, TNF-alpha, IL-6, TGF-beta, IL-10, IL-8, IL-17, IL-21, INF, and VEGF. In one embodiment, the cytokine is IL-15 that binds to an IL-15 receptor.

[0024] In one embodiment, the HLP molecule comprises a human serum albumin (HSA) polypeptide.

[0025] In one embodiment, the CAP component that reduces binding to the T cell surface antigen comprises an amino acid sequence of an extracellular epitope of human CD3ε. In one embodiment, the CAP component comprises the amino acid sequence of SEQ ID NO:5, or a homolog thereof.

[0026] In one embodiment, the CAP component that reduces binding to the NK cell surface antigen comprises an amino acid sequence of an extracellular epitope of the NK surface antigen.

[0027] In one embodiment, the protease cleavage domains of the antibody construct disclosed herein are cleaved by the same protease. In another embodiment, the protease cleavage domains of the antibody construct disclosed herein are cleaved by different proteases. In one embodiment, one or more of the protease cleavage domains comprise an amino acid sequence cleavable by a serine protease, a cysteine protease, an aspartate protease, or a matrix metalloprotease (MMP). In another embodiment, one or more of the protease cleavage domains comprise amino acid sequence that is a combination substrate cleaved by one or more of MMP2/9, uPA, matriptase, and legumain.

[0028] In one embodiment, the MMP can be, but is not limited to, matrix metalloprotease 1 (MMP-1), matrix metalloprotease 2 (MMP-2), matrix metalloprotease 9 (MMP-9), or matrix metalloprotease 14 (MMP-14). In one embodiment, the serine protease is an urokinase-type plasminogen activator (uPA) protease or a membrane-type serine protease (MT-SP1). In one embodiment, the combination substrate has the amino acid sequence of SEQ ID NO:35. In another embodiment, one or more of the protease cleavage domains comprise an amino acid sequence having the sequence of one of SEQ ID NOs:9-14 and SEQ ID NO:35.

[0029] In one embodiment, the tumor associated antigen (TAA) can be, but is not limited to, a tumor cell surface antigen, a tumor micro-environment antigen, a stromal antigen in the tumor micro-environment (TME), an angiogenic antigen in the TME, or an antigen on a blood vessel in a TME.

[0030] In one embodiment, the TAA can be, but is not limited to, EGFR, FcγRI, FcγRIIa FcγRIIb FcγRIIIa FcγRIIIb, CD28, CD137, CTLA-4, FAS, fibroblast growth factor receptor 1 (FGFR1), FGFR2, FGFR3, FGFR4, glucocorticoid-induced TNFR-related (GITR) protein, lymphotoxin-beta receptor (LTβR), toll-like receptors (TLR), tumor necrosis factor-related apoptosis-inducing ligand-receptor 1 (TRAIL receptor 1), TRAIL receptor 2, prostate-specific membrane antigen (PSMA) protein, prostate stem cell antigen (PSCA) protein, tumor-associated protein carbonic anhydrase IX (CAIX), epidermal growth factor receptor 1 (EGFR1), EGFRvIII, human epidermal growth factor receptor 2 (Her2/neu; Erb2), ErbB3 (HER3), Folate receptor, ephrin receptors, PDGFRa, ErbB-2, CD20, CD22, CD30, CD33, CD40, CD37, CD38, CD70, CD74, CD56, CD40), CD80, CD86, CD2, p53, cMet (tyrosine-protein kinase Met) (hepatocyte growth factor receptor) (HGFR), MAGE-A1, MAGE-A2, MAGE-A3, MAGE-A4, MAGE-A6, MAGE-A10, MAGE-A12, BAGE, DAM-6, DAM -10, GAGE-1, GAGE-2, GAGE-8, GAGE-3, GAGE -4, GAGE-5, GAGE-6, GAGE-7B, NA88-A, NY-ESO-1, BRCA1, BRCA2, MART-1, MC1R, Gp100, PSA, PSM, Tyrosinase, Wilms’ tumor antigen (WT1), TRP-1, TRP-2, ART-4, CAMEL, Cyp-B, hTERT, hTRT, iCE, MUC1, MUC2, P-cadherin, Myostatin (GDF8), Cripto (TDGF1), MUC5AC, PRAME, P15, RU1, RU2, SART-1, SART-3, WT1, AFP, β-catenin/m, Caspase-8/m, CDK-4/m, ELF2M, GnT-V, G250, HSP70-2M, HST-2, KIAA0205, MUM-1, MUM-2, MUM-3, Myosin/m, RAGE, SART-2, TRP-2/INT2, 707-AP, Annexin II, CDC27/m, TPI/mbcr-abl, ETV6/AML, LDLR/FUT, Pml/RARα, TEL/AML1, CD28, CD137, CanAg, Mesothelin, DR5, PD-1, PD1L, IGF-1R, CXCR4, Neuropilin 1, Glypicans, EphA2, CD138, B7-H3, B7-H4, gpA33, GPC3, SSTR2, ROR1, 5T4, or VEGF-R2.

[0031] In one embodiment, the TAA is EGFR, ROR1, PSMA, or 5T4. In one embodiment, when the antigen is EGFR, the first binding domain comprises the amino acid sequence of SEQ ID NO:34 or SEQ ID NO:37; when the antigen is ROR1, the first binding domain comprises the amino acid sequence of SEQ ID NO:156 or SEQ ID NO:166; when the antigen is PSMA, the first binding domain comprises the amino acid sequence of SEQ ID NO:168 or SEQ ID NO:170; and when the antigen is 5T4, the first binding domain comprises the amino acid sequence of SEQ ID NO:172 or SEQ ID NO:174.

[0032] In one embodiment, the tumor micro-environment antigen can be, but is not limited to, KIR, NKG2A, ILT, LILR, or TIGIT.

[0033] In one embodiment, the stromal antigen in the tumor micro-environment can be, but is not limited to, fibroblast activation protein (FAP), alpha smooth muscle actin (αSMA), PDGFRα, Integrin α11β1(ITGA11)VEGF, Tenascin-C, periostin, fibroblast specific protein 1 (S10A4, FSP1), desmin, vimentin, paladin, urokinase-type plasminogen activator receptor associated protein (UPARAP), galectin-3, podoplanin, platelet, CCL2, or CXCL12.

[0034] In one embodiment, the angiogenic antigen in the tumor micro-environment can be, but is not limited to, bFGF, INF, or VEGF.

[0035] In one embodiment, the antigen on a blood vessel in the tumor micro-environment comprises an endothelial cell surface antigen such as CD31, CD105, CD146, and CD144 etc.

[0036] In one embodiment, the third binding domain comprises a Fab region having a heavy chain (VH-CH) region and a light chain (VL-CL) region, and the first binding domain is located C-terminally to the VL-CL or VH-CH region of the third binding domain. In one embodiment, when the first binding domain is located C-terminally to the VL-CL region, the second binding domain is located C-terminally to the VH-CH region. Alternatively, when the first binding domain is located C-terminally to the VH-CH region, the second binding domain is located C-terminally to the VL-CL region.

[0037] In another embodiment, the third binding domain comprises a heavy chain variable region (VH) and a light chain variable region (VL), wherein the first regulatory domain, which comprises a HLP domain located N-terminally to the protease cleavage domain, is located N-terminally to the VH or VL region of the third binding domain. In one embodiment, when the first regulatory domain is located N-terminally to the VL region, the second regulatory domain, which comprises a CAP component located N-terminally to the protease cleavage domain, is located N-terminally to the VH region. Alternatively, when the first regulatory domain is located N-terminally to the VH region, the second regulatory domain, which comprises a CAP component located N-terminally to the protease cleavage domain, is located N-terminally to the VL region.

[0038] In another embodiment, the third binding domain comprises a heavy chain variable region (VH) and a light chain variable region (VL), wherein the single regulatory domain comprising a protease cleavage domain, a half-life prolonging (HLP) domain, and a CAP component is located N-terminally to the VH region or to the VL region of the third binding domain.

[0039] In one embodiment, the precursor tri-specific antibody construct comprises two polypeptides, polypeptide A and polypeptide B, each of which comprising one or more heavy chain variable region (VH) and one or more light chain variable region (VL), for example,
[0040] (a) polypeptide A comprises components having an order N-terminal to C-terminal: HLP domain, protease cleavage domain, VH of the third binding domain, first binding domain comprising first VH-first VL; and polypeptide B comprises components having an order N-terminal to C-terminal: CAP component, protease cleavage domain, VL of the third binding domain, second binding domain comprising second VH-second VL; or
[0041] (b) polypeptide A comprises components having an order N-terminal to C-terminal: HLP domain, protease cleavage domain, VH of the third binding domain, first binding domain comprising first VL-first VH; and polypeptide B comprises components having an order N-terminal to C-terminal: CAP component, protease cleavage domain, VL of the third binding domain, second binding domain comprising second VH-second VL; or
[0042] (c) polypeptide A comprises components having an order N-terminal to C-terminal: HLP domain, protease cleavage domain, VH of the third binding domain, first binding domain comprising first VH-first VL; and polypeptide B comprises components having an order N-terminal to C-terminal: CAP component, protease cleavage domain, VL of the third binding domain, second binding domain comprising second VL-second VH; or
[0043] (d) polypeptide A comprises components having an order N-terminal to C-terminal: HLP domain, protease cleavage domain, VH of the third binding domain, first binding domain comprising first VL-first VH; and polypeptide B comprises components having an order N-terminal to C-terminal: CAP component, protease cleavage domain, VL of the third binding domain, second binding domain comprising second VL-second VH; or
[0044] (e) polypeptide A comprises components having an order N-terminal to C-terminal: CAP component, protease cleavage domain, VH of the third binding domain, first binding domain comprising first VH-first VL; and polypeptide B comprises components having an order N-terminal to C-terminal: HLP domain, protease cleavage domain, VL of the third binding domain, second binding domain comprising second VH-second VL; or
[0045] (f) polypeptide A comprises components having an order N-terminal to C-terminal: CAP component, protease cleavage domain, VH of the third binding domain, first binding domain comprising first VL-first VH; and polypeptide B comprises components having an order N-terminal to C-terminal: HLP domain, protease cleavage domain, VL of the third binding domain, second binding domain comprising second VH-second VL; or
[0046] (g) polypeptide A comprises components having an order N-terminal to C-terminal: CAP component, protease cleavage domain, VH of the third binding domain, first binding domain comprising first VH-first VL; and polypeptide B comprises components having an order N-terminal to C-terminal: HLP domain, protease cleavage domain, VL of the third binding domain, second binding domain comprising second VL-second VH; or
[0047] (h) polypeptide A comprises components having an order N-terminal to C-terminal: CAP component, protease cleavage domain, VH of the third binding domain, first binding domain comprising first VL-first VH; and polypeptide B comprises components having an order N-terminal to C-terminal: HLP domain, protease cleavage domain, VL of the third binding domain, second binding domain comprising second VL-second VH.

[0048] In one embodiment, the precursor tri-specific antibody construct comprises two polypeptides, polypeptide A and polypeptide B, each of which comprising one or more heavy chain variable region (VH) and one or more light chain variable region (VL), for example,
[0049] (a) polypeptide A comprises components having an order N-terminal to C-terminal: VH of the third binding domain, first binding domain comprising first VH-first VL; and polypeptide B comprises components having an order N-terminal to C-terminal: VL of the third binding domain, second binding domain comprising second VH-second VL, wherein a regulatory domain is located N-terminal to either polypeptide A or B, the regulatory domain comprises components having an order N-terminal to C-terminal: a CAP component, a half-life prolonging (HLP) domain, and a protease cleavage domain; or
[0050] (b) polypeptide A comprises components having an order N-terminal to C-terminal: VH of the third binding domain, first binding domain comprising first VL-first VH; and polypeptide B comprises components having an order N-terminal to C-terminal: VL of the third binding domain, second binding domain comprising second VH-second VL, wherein a regulatory domain is located N-terminal to either polypeptide A or B, the regulatory domain comprises components having an order N-terminal to C-terminal: a CAP component, a half-life prolonging (HLP) domain, and a protease cleavage domain; or
[0051] (c) polypeptide A comprises components having an order N-terminal to C-terminal: VH of the third binding domain, first binding domain comprising first VH-first VL; and polypeptide B comprises components having an order N-terminal to C-terminal: VL of the third binding domain, second binding domain comprising second VL-second VH, wherein a regulatory domain is located N-terminal to either polypeptide A or B, the regulatory domain comprises components having an order N-terminal to C-terminal: a CAP component, a half-life prolonging (HLP) domain, and a protease cleavage domain; or
[0052] (d) polypeptide A comprises components having an order N-terminal to C-terminal: VH of the third binding domain, first binding domain comprising first VL-first VH; and polypeptide B comprises components having an order N-terminal to C-terminal: VL of the third binding domain, second binding domain comprising second VL-second VH, wherein a regulatory domain is located N-terminal to either polypeptide A or B, the regulatory domain comprises components having an order N-terminal to C-terminal: a CAP component, a half-life prolonging (HLP) domain, and a protease cleavage domain.

[0053] In another embodiment, the precursor tri-specific antibody construct comprises two polypeptides, polypeptide A and polypeptide B, each of which comprising one or more heavy chain variable region (VH) and one or more light chain variable region (VL), for example,
[0054] (a) polypeptide A comprises components having an order N-terminal to C-terminal: HLP domain, protease cleavage domain, VH of the third binding domain, first binding domain comprising first VH-first VL; and polypeptide B comprises components having an order N-terminal to C-terminal: CAP component, protease cleavage domain, VL of the third binding domain, second binding domain comprising second VH-second VL, protease cleavage domain, and a second CAP component; or
[0055] (b) polypeptide A comprises components having an order N-terminal to C-terminal: HLP domain, protease cleavage domain, VH of the third binding domain, first binding domain comprising first VL-first VH; and polypeptide B comprises components having an order N-terminal to C-terminal: CAP component, protease cleavage domain, VL of the third binding domain, second binding domain comprising second VH-second VL, protease cleavage domain, and a second CAP component; or
[0056] (c) polypeptide A comprises components having an order N-terminal to C-terminal: HLP domain, protease cleavage domain, VH of the third binding domain, first binding domain comprising first VH-first VL; and polypeptide B comprises components having an order N-terminal to C-terminal: CAP component, protease cleavage domain, VL of the third binding domain, second binding domain comprising second VL-second VH, protease cleavage domain, and a second CAP component; or
[0057] (d) polypeptide A comprises components having an order N-terminal to C-terminal: HLP domain, protease cleavage domain, VH of the third binding domain, first binding domain comprising first VL-first VH; and polypeptide B comprises components having an order N-terminal to C-terminal: CAP component, protease cleavage domain, VL of the third binding domain, second binding domain comprising second VL-second VH, protease cleavage domain, and a second CAP component; or
[0058] (e) polypeptide A comprises components having an order N-terminal to C-terminal: CAP component, protease cleavage domain, VH of the third binding domain, first binding domain comprising first VH-first VL; and polypeptide B comprises components having an order N-terminal to C-terminal: HLP domain, protease cleavage domain, VL of the third binding domain, second binding domain comprising second VH-second VL, protease cleavage domain, and a second CAP component; or
[0059] (f) polypeptide A comprises components having an order N-terminal to C-terminal: CAP component, protease cleavage domain, VH of the third binding domain, first binding domain comprising first VL-first VH; and polypeptide B comprises components having an order N-terminal to C-terminal: HLP domain, protease cleavage domain, VL of the third binding domain, second binding domain comprising second VH-second VL, protease cleavage domain, and a second CAP component; or
[0060] (g) polypeptide A comprises components having an order N-terminal to C-terminal: CAP component, protease cleavage domain, VH of the third binding domain, first binding domain comprising first VH-first VL; and polypeptide B comprises components having an order N-terminal to C-terminal: HLP domain, protease cleavage domain, VL of the third binding domain, second binding domain comprising second VL-second VH, protease cleavage domain, and a second CAP component; or
[0061] (h) polypeptide A comprises components having an order N-terminal to C-terminal: CAP component, protease cleavage domain, VH of the third binding domain, first binding domain comprising first VL-first VH; and polypeptide B comprises components having an order N-terminal to C-terminal: HLP domain, protease cleavage domain, VL of the third binding domain, second binding domain comprising second VL-second VH, protease cleavage domain, and a second CAP component.

[0062] In another embodiment, the precursor tri-specific antibody construct comprises two polypeptides, polypeptide A and polypeptide B, each of which comprising one or more heavy chain variable region (VH) and one or more light chain variable region (VL), for example,
[0063] (a) polypeptide A comprises components having an order N-terminal to C-terminal: VH of the third binding domain, first binding domain comprising first VH-first VL; and polypeptide B comprises components having an order N-terminal to C-terminal: VL of the third binding domain, second binding domain comprising second VH-second VL, protease cleavage domain, and a CAP component, wherein a regulatory domain is located N-terminal to either polypeptide A or B, the regulatory domain comprises components having an order N-terminal to C-terminal: a second CAP component, a half-life prolonging (HLP) domain, and a protease cleavage domain; or
[0064] (b) polypeptide A comprises components having an order N-terminal to C-terminal: VH of the third binding domain, first binding domain comprising first VL-first VH; and polypeptide B comprises components having an order N-terminal to C-terminal: VL of the third binding domain, second binding domain comprising second VH-second VL, protease cleavage domain, and a CAP component, wherein a regulatory domain is located N-terminal to either polypeptide A or B, the regulatory domain comprises components having an order N-terminal to C-terminal: a second CAP component, a half-life prolonging (HLP) domain, and a protease cleavage domain; or
[0065] (c) polypeptide A comprises components having an order N-terminal to C-terminal: VH of the third binding domain, first binding domain comprising first VH-first VL; and polypeptide B comprises components having an order N-terminal to C-terminal: VL of the third binding domain, second binding domain comprising second VL-second VH, protease cleavage domain, and a CAP component, wherein a regulatory domain is located N-terminal to either polypeptide A or B, the regulatory domain comprises components having an order N-terminal to C-terminal: a second CAP component, a half-life prolonging (HLP) domain, and a protease cleavage domain; or
[0066] (d) polypeptide A comprises components having an order N-terminal to C-terminal: VH of the third binding domain, first binding domain comprising first VL-first VH; and polypeptide B comprises components having an order N-terminal to C-terminal: VL of the third binding domain, second binding domain comprising second VL-second VH, protease cleavage domain, and a CAP component, wherein a regulatory domain is located N-terminal to either polypeptide A or B, the regulatory domain comprises components having an order N-terminal to C-terminal: a second CAP component, a half-life prolonging (HLP) domain, and a protease cleavage domain.

[0067] In another embodiment, the precursor tri-specific antibody construct comprises two polypeptides, polypeptide A and polypeptide B, comprising heavy chain variable region (VH) or light chain variable region (VL), wherein
[0068] (a) polypeptide A comprises components having an order N-terminal to C-terminal: HLP domain, protease cleavage domain, VH of the third binding domain, first binding domain comprising first VH-first VL; and polypeptide B comprises components having an order N-terminal to C-terminal: CAP component, protease cleavage domain, VL of the third binding domain, and a second binding domain comprising a cytokine receptor engager; or
[0069] (b) polypeptide A comprises components having an order N-terminal to C-terminal: HLP domain, protease cleavage domain, VH of the third binding domain, first binding domain comprising first VL-first VH; and polypeptide B comprises components having an order N-terminal to C-terminal: CAP component, protease cleavage domain, VL of the third binding domain, and a second binding domain comprising a cytokine receptor engager; or
[0070] (c) polypeptide A comprises components having an order N-terminal to C-terminal: CAP component, protease cleavage domain, VH of the third binding domain, first binding domain comprising first VH-first VL; and polypeptide B comprises components having an order N-terminal to C-terminal: HLP domain, protease cleavage domain, VL of the third binding domain, and a second binding domain comprising a cytokine receptor engager; or
[0071] (d) polypeptide A comprises components having an order N-terminal to C-terminal: CAP component, protease cleavage domain, VH of the third binding domain, first binding domain comprising first VL-first VH; and polypeptide B comprises components having an order N-terminal to C-terminal: HLP domain, protease cleavage domain, VL of the third binding domain, and a second binding domain comprising a cytokine receptor engager.

[0072] In another embodiment, the precursor tri-specific antibody construct comprises two polypeptides, polypeptide A and polypeptide B, comprising heavy chain variable region (VH) or light chain variable region (VL), wherein
[0073] (a) polypeptide A comprises components having an order N-terminal to C-terminal: VH of the third binding domain, first binding domain comprising first VH-first VL; and polypeptide B comprises components having an order N-terminal to C-terminal: VL of the third binding domain, and a second binding domain comprising a cytokine receptor engager, wherein a regulatory domain is located N-terminal to either polypeptide A or B, the regulatory domain comprises components having an order N-terminal to C-terminal: a CAP component, a half-life prolonging (HLP) domain, and a protease cleavage domain; or
[0074] (b) polypeptide A comprises components having an order N-terminal to C-terminal: VH of the third binding domain, first binding domain comprising first VL-first VH; and polypeptide B comprises components having an order N-terminal to C-terminal: VL of the third binding domain, and a second binding domain comprising a cytokine receptor engager, wherein a regulatory domain is located N-terminal to either polypeptide A or B, the regulatory domain comprises components having an order N-terminal to C-terminal: a CAP component, a half-life prolonging (HLP) domain, and a protease cleavage domain; or
[0075] (c) polypeptide A comprises components having an order N-terminal to C-terminal: VH of the third binding domain, first binding domain comprising first VH-first VL; and polypeptide B comprises components having an order N-terminal to C-terminal: VL of the third binding domain, and a second binding domain comprising a cytokine receptor engager, wherein a regulatory domain is located N-terminal to either polypeptide A or B, the regulatory domain comprises components having an order N-terminal to C-terminal: a CAP component, a half-life prolonging (HLP) domain, and a protease cleavage domain; or
[0076] (d) polypeptide A comprises components having an order N-terminal to C-terminal: VH of the third binding domain, first binding domain comprising first VL-first VH; and polypeptide B comprises components having an order N-terminal to C-terminal: VL of the third binding domain, and a second binding domain comprising a cytokine receptor engager, wherein a regulatory domain is located N-terminal to either polypeptide A or B, the regulatory domain comprises components having an order N-terminal to C-terminal: a CAP component, a half-life prolonging (HLP) domain, and a protease cleavage domain.

[0077] In some embodiments of the above-described precursor tri-specific antibody constructs, a second binding domain comprises two scFv, each binding to the same or different target antigen. The VH and VL domains of the two scFv can be arranged, from the N-terminal to C-terminal, as VH-VL-VH-VL, VH-VL-VL-VH, VL-VH-VH-VL, or VL-VH-VL-VH,

[0078] In one embodiment, the third binding domain comprises a light chain variable region (VL) and a heavy chain variable region (VH), wherein the VL comprises a light chain CDR1 having the sequence of one of SEQ ID NOs:107-109, a light chain CDR2 (SEQ ID NO:110), and a light chain CDR3 having the sequence of one of SEQ ID NOs:111-112, and the VH comprises a heavy chain CDR1 (SEQ ID NO:104), a heavy chain CDR2 (SEQ ID NO:105), and a heavy chain CDR3 (SEQ ID NO:106). In one embodiment, the VL comprises an amino acid sequence having the sequence of one of SEQ ID NOs:75-103 and 116, or an amino acid sequence having at least 80% homology thereof. In one embodiment, the VH comprises the amino acid sequence having the sequence of one of SEQ ID NOs:46-72 and 114, or an amino acid sequence having at least 80% homology thereto.

[0079] In one embodiment, disclosed herein is a pharmaceutical composition comprising a pharmaceutically acceptable carrier and the precursor tri-specific antibody construct disclosed herein.

[0080] In one embodiment, disclosed herein is a nucleic acid construct comprising one or more nucleic acid sequences, wherein the nucleic acid construct encodes a precursor tri-specific antibody disclosed herein. In one embodiment, there is provided an expression vector comprising such nucleic acid construct. In another embodiment, there is provided an isolated host cell comprising such expression vector.

[0081] In one embodiment, there is provided a method of treating, preventing, inhibiting the growth of, delaying disease progression, reducing tumor load, or reducing the incidence of a cancer or a tumor, or any combination thereof, in a subject in need of such treatment, comprising a step of administering to the subject a pharmaceutical composition comprising a precursor tri-specific antibody construct disclosed herein. In one embodiment, this method reduces the minimal residual disease, increases remission, increases remission duration, reduces tumor relapse rate, prevents metastasis of the tumor or the cancer, or reduces the rate of metastasis of the tumor or the cancer, or any combination thereof, compared with a subject not administered with the pharmaceutical composition. In one embodiment, the cancer or tumor can be a solid tumor or non-solid tumor, or the cancer or tumor can be a metastasis of a cancer or tumor.

[0082] In one embodiment, examples of non-solid tumor include, but are not limited to, a hematopoietic malignancy, a blood cell cancer, a leukemia, a myelodysplastic syndrome, a lymphoma, a multiple myeloma (a plasma cell myeloma), an acute lymphoblastic leukemia, an acute myelogenous leukemia, a chronic myelogenous leukemia, a Hodgkin lymphoma, a non-Hodgkin lymphoma, and plasma cell leukemia; or wherein the solid tumor is selected from the group consisting of a sarcoma, a carcinoma, a fibrosarcoma, a myxosarcoma, a liposarcoma, a chondrosarcoma, an osteogenic sarcoma, a chordoma, an angiosarcoma, an endotheliosarcoma, a lymphangiosarcoma, a lymphangioendotheliosarcoma, a synovioma, a mesothelioma, an Ewing’s tumor, a leiomyosarcoma, a rhabdomyosarcoma, a colon carcinoma, a pancreatic cancer or tumor, a breast cancer or tumor, an ovarian cancer or tumor, a prostate cancer or tumor, a squamous cell carcinoma, a basal cell carcinoma, an adenocarcinoma, a sweat gland carcinoma, a sebaceous gland carcinoma, a papillary carcinoma, a papillary adenocarcinomas, a cystadenocarcinoma, a medullary carcinoma, a bronchogenic carcinoma, a renal cell carcinoma, a hepatoma, a bile duct carcinoma, a choriocarcinoma, a seminoma, an embryonal carcinoma, a Wilm’s tumor, a cervical cancer or tumor, a uterine cancer or tumor, a testicular cancer or tumor, a lung carcinoma, a small cell lung carcinoma, a bladder carcinoma, an epithelial carcinoma, a glioma, an astrocytoma, a medulloblastoma, a craniopharyngioma, an ependymoma, a pinealoma, a hemangioblastoma, an acoustic neuroma, an oligodenroglioma, a schwannoma, a meningioma, a melanoma, a neuroblastoma, or a retinoblastoma.

[0083] In another embodiment, there is provided a method of treating, preventing, inhibiting the growth of, delaying disease progression, reducing tumor load, or reducing the incidence of a cancer or a tumor, or any combination thereof, in a subject in need of such treatment, comprising a step of administering to the subject a pharmaceutical composition comprising nucleic acid construct (which may one or more nucleic acid sequences) that encodes a precursor tri-specific antibody construct disclosed herein. In one embodiment, this method reduces the minimal residual disease, increases remission, increases remission duration, reduces tumor relapse rate, prevents metastasis of the tumor or the cancer, or reduces the rate of metastasis of the tumor or the cancer, or any combination thereof, compared with a subject not administered with the pharmaceutical composition.

[0084] In another embodiment, there is provided a method of producing a precursor tri-specific antibody construct disclosed herein, the method comprising the steps of: (i) culturing a host cell comprising nucleic acid sequences that encodes precursor tri-specific antibody construct polypeptides A and B, (ii) expressing the polypeptides A and B, (iii) isolating the expressed polypeptides A and B, and (iv) dimerizing the polypeptides A and B. In one embodiment, expressing these two polypeptides comprises expression from a single type of host cells, or expression from two types of host cells each expressing a different polypeptide, polypeptide A and polypeptide B, respectively.

### BRIEF DESCRIPTION OF THE DRAWINGS

[0085] The subject matter regarded as the precursor tri-specific (tri-body) antibody constructs that bind to at least an NK cell surface antigen disclosed herein is particularly pointed out and distinctly claimed in the concluding portion of the specification. The precursor tri-specific (tri-body) antibody constructs, however, both as to organization and method of use, together with objects, features, and advantages thereof, may best be understood by reference to the following detailed description when read with the accompanying drawings in which:

[0086] FIG. 1 shows flow diagrams of protease specific activation within tumor tissue or within a tumor environment of precursor tri-specific antibody constructs, wherein T cell and/or NK cell engagement and activation is limited to tumor sites.

[0087] FIG. 2A presents one embodiment of a precursor tri-specific antibody (tri-body) construct having antibody binding domains and regulatory domains as described herein, the Fab portion recognizes a CD3 surface antigen, one scFv recognizes a tumor associated antigen (TAA), and one scFv recognizes a NK cell surface antigen (e.g. NKG2A or NKG2D). FIG. 2B presents another embodiment of the tri-body construct of FIG. 2A. FIG. 2C presents one embodiment of a precursor tri-specific antibody construct as described herein but lacking the regulatory domain comprising the half-life extending component (HSA). FIG. 2D presents one embodiment of a precursor tri-specific antibody construct as described herein but lacking the regulatory domain comprising the CD3 CAP domain. FIG. 2E presents one embodiment of an active tri-specific (tribody) antibody construct, lacking the regulatory domains with the HSA and CAP domains. FIG. 2F presents another embodiment of an active tri-specific (tribody) antibody construct, lacking the regulatory domains with the HSA and CAP domains. FIG. 2G presents one embodiment of a precursor tri-specific antibody construct as described herein, wherein the regulatory domain N-terminal to the Fab comprises a single regulatory domain comprising a CAP domain, a HSA sequence, and a protease cleavable linker on the same polypeptide.

[0088] FIG. 3A presents one embodiment of a precursor tri-specific antibody (tri-body) construct having antibody binding domains and regulatory domains as described herein, the Fab portion recognizes a CD3 surface antigen, one scFv recognizes a tumor associated antigen (TAA), and one scFv recognizes a NK cell surface antigen (e.g. NKG2A or NKG2D). The anti-NK scFv further comprises a regulatory domain comprising a CAP domain. FIG. 3B presents one embodiment of a precursor tri-specific antibody construct as described herein, wherein the regulatory domain N-terminal to the Fab comprises a single regulatory domain comprising a CAP domain, a HSA sequence, and a protease cleavable linker on the same polypeptide. FIG. 3C presents another embodiment of a precursor tri-specific antibody construct as described in FIG. 3B. FIG. 3D presents one embodiment of a precursor tri-specific antibody construct as described herein but lacking the regulatory domain comprising the half-life extending component (HSA). FIG. 3E presents one embodiment of a precursor tri-specific antibody construct as described herein but lacking the regulatory domain comprising the CD3 CAP domain. FIG. 3F presents one embodiment of an active tri-specific (tribody) antibody construct, lacking the regulatory domains with the HSA and CAP domains.

[0089] FIG. 4A presents one embodiment of a precursor tri-specific antibody (tri-body) construct having antibody binding domains as described herein, the Fab portion recognizes a NK cell surface antigen (e.g. NKG2A or NKG2D), one scFv recognizes a tumor associated antigen (TAA). The regulatory domain N-terminal to the Fab comprises a single regulatory domain comprising a CAP domain, a HSA sequence, and a protease cleavable linker on the same polypeptide. The tri-body construct also has a cytokine receptor engager comprising a cytokine that binds to a cytokine receptor, for example, an IL-15 that binds to IL-15 receptor. FIG. 4B presents another embodiment of the tri-body construct of FIG. 4A, wherein the regulatory domain N-terminal to the Fab is the one shown in FIG. 2A. FIG. 4C presents one embodiment of an active tri-specific (tribody) antibody construct derived from the precursor construct of FIGS. 4A or 4B, wherein the Fab portion recognizes a NK cell surface antigen (e.g. NKG2A or NKG2D), one scFv recognizes a tumor associated antigen (TAA), and there is a cytokine receptor engager such as IL-15.

[0090] FIG. 5A presents one embodiment of a precursor tri-specific antibody (tri-body) construct having three antibody binding domains and regulatory domains as described herein, the Fab portion recognizes a NK cell surface antigen (e.g. NKG2D), one scFv recognizes a tumor associated antigen (TAA), and one scFv recognizes another NK cell surface antigen (e.g. NKG2A). FIG. 5B presents another embodiment of a precursor tri-specific antibody construct of FIG. 5A, wherein the Fab binds to NKG2A and one scFv binds to NKG2D. In another embodiment, the anti-NK Fab binds to NKG2A and the anti-NK-scFv binds to NKG2D. FIG. 5C presents one embodiment of a precursor tri-specific antibody (tri-body) construct having the antibody binding domains and regulatory domains as described herein, the Fab portion recognizes a NK cell surface antigen (e.g. NKG2D), one scFv recognizes a tumor associated antigen (TAA), and one scFv recognizes another NK cell surface antigen (e.g. NKG2A). The regulatory domain N-terminal to the Fab comprises a single polypeptide chain. FIG. 5D presents another embodiment of a precursor tri-specific antibody construct of FIG. 5C, wherein the Fab binds to NKG2A and one scFv binds to NKG2D. FIG. 5E presents one embodiment of an active tri-specific (tribody) antibody construct derived from the precursor constructs of FIGS. 5A-5D, wherein the anti-NK Fab binds to NKG2D and the anti-NK-scFv binds to NKG2A. FIG. 5F presents another embodiment of an active tri-specific (tribody) antibody construct derived from the precursor constructs of FIGS. 5A-5D, wherein the anti-NK Fab binds to NKG2A and the anti-NK-scFv binds to NKG2D.

[0091] FIGS. 6A and 6B present embodiments of an amino acid sequence of a Heavy Chain (HC) polypeptide of an activated tri-specific (tri-body) antibody construct (Construct 1; VLVH) and an optimized nucleotide sequences encoding the Heavy Chain (HC) activated construct, Amino acid sequences are presented N-terminal to C-terminal, and nucleic acid sequences are presented 5′ to 3′. FIG. 6A presents one embodiment of an amino acid sequence of a Heavy Chain (HC) polypeptide of an activated construct, having the N-terminal to C-terminal order and components as follows: h1F3.5-G1Fd anti-EGFR VL-linker-VH (SEQ ID NO: 138). The amino acid sequences of the component parts of the HC polypeptide shown in FIG. 6A include: Linker (SEQ ID NO: 158), anti-CD3epsilon variable heavy chain and constant heavy chain region 1 (SEQ ID NO: 113), followed by two marked cysteine residues (marked bold and underline), which may participate in disulfide double bond, followed by an anti-EGFR scFv VL (SEQ ID NO: 34)-linker (SEQ ID NO: 39)-VH (SEQ ID NO: 37) chain. FIG. 6B presents one embodiment of an optimized nucleic acid sequence (DNA) encoding a Heavy Chain (HC) polypeptide of an activated tri-specific (tri-body) construct, having the 5′ to 3′ order and components as follows (SEQ ID NO: 150). The nucleic acid sequences encoding the component parts of the HC polypeptide shown in FIG. 6A include: Linker (SEQ ID NO: 154), anti-CD3epsilon variable heavy chain and constant heavy chain region 1 (SEQ ID NO: 155), followed by two marked cysteine residues (marked bold and underline), which may participate in disulfide double bond, followed by an anti-EGFR scFv VL (SEQ ID NO: 36)-linker (SEQ ID NO: 40)-VH (SEQ ID NO: 38) chain.

[0092] FIGS. 7A and 7B present embodiments of an amino acid sequence of a Light Chain (LC) polypeptide of an activated tri-specific (tri-body) antibody construct (Construct 1; VLVH) and an optimized nucleotide sequences encoding the Light Chain (LC) activated construct, Amino acid sequences are presented N-terminal to C-terminal, and nucleic acid sequences are presented 5′ to 3′. FIG. 7A presents one embodiment of an amino acid sequence of a Light Chain (LC) polypeptide of an activated construct, having the N-terminal to C-terminal order and components as follows: h1F3.1-λLC anti-EGFR VL-linker-VH (SEQ ID NO: 139). The amino acid sequences of the component parts of the LC polypeptide shown in FIG. 7A include: Linker (SEQ ID NO: 158), anti-CD3epsilon variable light chain and lambda light chain (SEQ ID NO: 74), followed by marked cysteine residues (marked bold and underline), which may participate in a disulfide double bond, followed by an anti-EGFR scFv VL (SEQ ID NO: 34)-linker (SEQ ID NO: 39)-VH (SEQ ID NO: 37) chain. FIG. 7B presents one embodiment of an optimized nucleic acid sequence (DNA) encoding a Light Chain (LC) polypeptide of an activated tri-specific (tri-body) construct, having the 5′ to 3′ order and components as follows (SEQ ID NO: 151). The nucleic acid sequences encoding the component parts of the LC polypeptide shown in FIG. 7A include: Linker (SEQ ID NO: 154), anti-CD3epsilon variable light chain and lambda light chain region (SEQ ID NO: 159), followed by marked cysteine residues (marked bold and underline), which may participate in a disulfide double bond, followed by an anti-EGFR scFv VL (SEQ ID NO: 36)-linker (SEQ ID NO: 40)-VH (SEQ ID NO: 38) chain.

[0093] FIGS. 8A and 8B present embodiments of an amino acid sequence of a Heavy Chain (HC) polypeptide of an activated tri-specific (tri-body) antibody construct (Construct 2; VHVL) and an optimized nucleotide sequences encoding the Heavy Chain (HC) activated construct. Amino acid sequences are presented N-terminal to C-terminal, and nucleic acid sequences are presented 5′ to 3′. FIG. 8A presents one embodiment of an amino acid sequence of a Heavy Chain (HC) polypeptide of an activated construct, having the N-terminal to C-terminal order and components as follows: h1F3.5-G1Fd-(VH-linker-VL) (SEQ ID NO: 140). The amino acid sequences of the component parts of the HC polypeptide shown in FIG. 8A include: Linker (SEQ ID NO: 158), anti-CD3epsilon variable heavy chain and constant heavy chain region 1 (SEQ ID NO: 113), followed by two marked cysteine residues (marked bold and underline), which may participate in disulfide double bond, followed by an anti-EGFR scFv VH (SEQ ID NO: 37)-linker (SEQ ID NO: 39)-VL (SEQ ID NO: 34) chain. FIG. 8B presents one embodiment of an optimized nucleic acid sequence (DNA) encoding a Heavy Chain (HC) polypeptide of an activated tri-specific (tri-body) construct, having the 5′ to 3′ order and components as follows (SEQ ID NO: 152). The nucleic acid sequences encoding the component parts of the HC polypeptide shown in FIG. 8A include: Linker (SEQ ID NO: 154), anti-CD3epsilon variable heavy chain and constant heavy chain region 1 (SEQ ID NO: 155), followed by two marked cysteine residues (marked bold and underline), which may participate in disulfide double bonds, followed by an anti-EGFR scFv VH (SEQ ID NO: 38)-linker (SEQ ID NO: 40)-VH (SEQ ID NO: 36) chain.

[0094] FIGS. 9A and 9B present embodiments of an amino acid sequence of a Light Chain (LC) polypeptide of an activated tri-specific (tri-body) antibody construct (Construct 2; VHVL) and an optimized nucleotide sequences encoding the Light Chain (LC) activated construct. Amino acid sequences are presented N-terminal to C-terminal, and nucleic acid sequences are presented 5′ to 3′. FIG. 9A presents one embodiment of an amino acid sequence of a Light Chain (LC) polypeptide of an activated construct, having the N-terminal to C-terminal order and components as follows: h1F3.1-λLC- Anti-EGFR (VH-linker-VL) (SEQ ID NO: 141). The amino acid sequences of the component parts of the LC polypeptide shown in FIG. 9A include: Linker (SEQ ID NO: 158), anti-CD3epsilon variable light chain and lambda light chain (SEQ ID NO: 74), followed by marked cysteine residues (marked bold and underline), which may participate in a disulfide double bond, followed by an anti-EGFR scFv VH (SEQ ID NO: 37)-linker (SEQ ID NO: 39)-VL (SEQ ID NO: 34) chain. FIG. 9B presents one embodiment of an optimized nucleic acid sequence (DNA) encoding a Light Chain (LC) polypeptide of an activated tri-specific (tri-body) construct, having the 5′ to 3′ order and components as follows (SEQ ID NO: 153). The nucleic acid sequences encoding the component parts of the LC polypeptide shown in FIG. 9A include: Linker (SEQ ID NO: 154), anti-CD3epsilon variable light chain and lambda light chain region (SEQ ID NO: 159), followed by marked cysteine residues (marked bold and underline), which may participate in a disulfide double bond, followed by an anti-EGFR scFv VH (SEQ ID NO: 38)-linker (SEQ ID NO: 40)-VL (SEQ ID NO: 36) chain.

[0095] FIGS. 10A and 10B present embodiments of an amino acid sequence of a Heavy Chain (HC) polypeptide of precursor tri-specific (tri-body) antibody construct (Construct 3; VLVH) and an optimized nucleotide sequences encoding the Heavy Chain (HC) precursor construct, Amino acid sequences are presented N-terminal to C-terminal, and nucleic acid sequences are presented 5′ to 3′. FIG. 10A presents one embodiment of an amino acid sequence of a Heavy Chain (HC) polypeptide of a precursor construct, having the N-terminal to C-terminal order and components as follows: hHSA-G-PLGLAG (MMP2/9)- (cloning)-h1F3.5-G1Fd anti-EGFR VL-linker-VH (SEQ ID NO: 130). The amino acid sequences of the component parts of the HC polypeptide shown in FIG. 10A include: human serum albumin (HSA) (SEQ ID NO: 7), MMP2/9 protease cleavable Linker (SEQ ID NO: 160 (linker with cleavable sequence and SEQ ID NO: 9 (cleavable sequence)), anti-CD3epsilon variable heavy chain and constant heavy chain region 1 (SEQ ID NO: 113), followed by two marked cysteine residues (marked bold and underline), which may participate in disulfide double bonds, followed by an anti-EGFR scFv VL (SEQ ID NO: 34)-linker (SEQ ID NO: 39)-VH (SEQ ID NO: 37) chain. FIG. 10B presents one embodiment of an optimized nucleic acid sequence (DNA) encoding a Heavy Chain (HC) polypeptide of the precursor tri-specific (tri-body) antibody construct, having the 5′ to 3′ order and components as follows (SEQ ID NO: 142). The nucleic acid sequences encoding the component parts of the HC polypeptide shown in FIG. 10A include: human serum albumin (HSA) (SEQ ID NO: 8), MMP2/9 protease cleavable Linker (SEQ ID NO: 161 (linker with cleavable sequence and SEQ ID NO: 33 (cleavable sequence)), anti-CD3epsilon variable heavy chain and constant heavy chain region 1 (SEQ ID NO: 155), followed by two marked cysteine residues (marked bold and underline), which may participate in disulfide double bond, followed by an anti-EGFR scFv VL (SEQ ID NO: 36)-linker (SEQ ID NO: 40)-VH (SEQ ID NO: 38) chain.

[0096] FIGS. 11A and 11B present embodiments of an amino acid sequence of a Light Chain (LC) polypeptide of a precursor tri-specific (tri-body) antibody construct (Construct 3; VLVH) and an optimized nucleotide sequences encoding the Light Chain (LC) precursor construct, Amino acid sequences are presented N-terminal to C-terminal, and nucleic acid sequences are presented 5′ to 3′. FIG. 11A presents one embodiment of an amino acid sequence of a Light Chain (LC) polypeptide of a precursor construct, having the N-terminal to C-terminal order and components as follows: Cap-h1F3.1-λLC anti-EGFR VL-linker-VH MM2/9 cleavage; SEQ ID NO: 131). The amino acid sequences of the component parts of the LC polypeptide shown in FIG. 11A include: CAP (SEQ ID NO: 5), MMP2/9 protease cleavable Linker (SEQ ID NO: 160 and SEQ ID NO: 9 (cleavable sequence)), anti-CD3epsilon variable light chain and lambda light chain (SEQ ID NO: 74), followed by marked cysteine residues (marked bold and underline), which may participate in a disulfide double bond, followed by an anti-EGFR scFv VL (SEQ ID NO: 34)-linker (SEQ ID NO: 39)-VH (SEQ ID NO: 37) chain. FIG. 11B presents one embodiment of an optimized nucleic acid sequence (DNA) encoding the Light Chain (LC) polypeptide of the precursor tri-specific (tri-body) antibody construct, having the 5′ to 3′ order and components as follows (SEQ ID NO: 143). The nucleic acid sequences encoding the component parts of the LC polypeptide shown in FIG. 11A include: CAP (SEQ ID NO: 164), MMP2/9 protease cleavable Linker (SEQ ID NO: 161 and SEQ ID NO: 33 (cleavable sequence)), anti-CD3epsilon variable light chain and lambda light chain region (SEQ ID NO: 159), followed by marked cysteine residues (marked bold and underline), which may participate in a disulfide double bond, followed by an anti-EGFR scFv VL (SEQ ID NO: 36)-linker (SEQ ID NO: 40)-VH (SEQ ID NO: 38) chain.

[0097] FIGS. 12A and 12B present embodiments of an amino acid sequence of a Heavy Chain (HC) polypeptide of precursor tri-specific (tri-body) antibody construct (Construct 4; VHVL) and an optimized nucleotide sequences encoding the Heavy Chain (HC) precursor construct. Amino acid sequences are presented N-terminal to C-terminal, and nucleic acid sequences are presented 5′ to 3′. FIG. 12A presents one embodiment of an amino acid sequence of a Heavy Chain (HC) polypeptide of a precursor construct, having the N-terminal to C-terminal order and components as follows: hHSA-G-PLGLAG (MMP2/9)- (cloning)-h1F3.5-G1Fd Anti-EGFR (VH-linker-VL) (SEQ ID NO: 132). The amino acid sequences of the component parts of the HC polypeptide shown in FIG. 12A include: human serum albumin (HSA) (SEQ ID NO: 7), MMP2/9 protease cleavable Linker (SEQ ID NO: 160 and SEQ ID NO: 9 (cleavable portion)), anti-CD3epsilon variable heavy chain and constant heavy chain region 1 (SEQ ID NO: 113), followed by two marked cysteine residues (marked bold and underline), which may participate in disulfide double bonds, followed by an anti-EGFR scFv VH (SEQ ID NO: 37)-linker (SEQ ID NO: 40)-VL (SEQ ID NO: 34) chain. FIG. 12B presents one embodiment of an optimized nucleic acid sequence (DNA) encoding the Heavy Chain (HC) polypeptide of the precursor tri-specific (tri-body) antibody construct, having the 5′ to 3′ order and components as follows (SEQ ID NO: 144). The nucleic acid sequences encoding the component parts of the HC polypeptide shown in FIG. 12A include: human serum albumin (HSA) (SEQ ID NO: 8), MMP2/9 protease cleavable Linker (SEQ ID NO: 161 and SEQ ID NO: 33 (cleavable linker)), anti-CD3epsilon variable heavy chain and constant heavy chain region 1 (SEQ ID NO: 155), followed by two marked cysteine residues (marked bold and underline), which may participate in disulfide double bond, followed by an anti-EGFR scFv VH (SEQ ID NO: 38)-linker (SEQ ID NO: 40)-VL (SEQ ID NO: 36) chain.

[0098] FIGS. 13A and 13B present embodiments of an amino acid sequence of a Light Chain (LC) polypeptide of a precursor tri-specific (tri-body) antibody construct (Construct 4; VLVH) and an optimized nucleotide sequences encoding the Light Chain (LC) precursor construct. Amino acid sequences are presented N-terminal to C-terminal, and nucleic acid sequences are presented 5′ to 3′. FIG. 13A presents one embodiment of an amino acid sequence of a Light Chain (LC) polypeptide of a precursor construct, having the N-terminal to C-terminal order and components as follows: Cap-MMP2/9 cleavage -h1F3.1-λLC-Anti-EGFR(VH-linker-VL) (SEQ ID NO: 133; plasmid 7). The amino acid sequences of the component parts of the LC polypeptide shown in FIG. 13A include: CAP (SEQ ID NO: 5), MMP2/9 protease cleavable Linker (SEQ ID NO: 160 and SEQ ID NO: 9 (cleavable linker), anti-CD3epsilon variable light chain and lambda light chain (SEQ ID NO: 74), followed by marked cysteine residues (marked bold and underline), which may participate in a disulfide double bond, followed by an anti-EGFR scFv VH (SEQ ID NO: 37)-linker (SEQ ID NO: 40)-VL (SEQ ID NO: 34) chain. FIG. 13B presents one embodiment of an optimized nucleic acid sequence (DNA) encoding the Light Chain (LC) polypeptide of the precursor tri-specific (tri-body) antibody construct, having the 5′ to 3′ order and components as follows (SEQ ID NO: 145). The nucleic acid sequences encoding the component parts of the LC polypeptide shown in FIG. 13A include: CAP (SEQ ID NO: 164), MMP2/9 protease cleavable Linker (SEQ ID NO: 161 and SEQ ID NO: 33 (cleavable sequence)), anti-CD3epsilon variable light chain and lambda light chain region (SEQ ID NO: 159), followed by marked cysteine residues (marked bold and underline), which may participate in a disulfide double bond, followed by an anti-EGFR scFv VH (SEQ ID NO: 38)-linker (SEQ ID NO: 40)-VL (SEQ ID NO: 36) chain.

[0099] FIGS. 14A and 14B present embodiments of an amino acid sequence of a Heavy Chain (HC) polypeptide of non-cleavable (non-activatable) precursor tri-specific (tri-body) antibody construct (Construct 5; VLVH) and an optimized nucleotide sequences encoding the Heavy Chain (HC) non-cleavable precursor construct. Amino acid sequences are presented N-terminal to C-terminal, and nucleic acid sequences are presented 5′ to 3′. FIG. 14A presents one embodiment of an amino acid sequence of a Heavy Chain (HC) polypeptide of a non-cleavable precursor construct, having the N-terminal to C-terminal order and components as follows: hHSA-G-PLGLAG NC-h1F3.5-G1Fd anti-EGFR VL-linker-VH (SEQ ID NO: 134). The amino acid sequences of the component parts of the HC polypeptide shown in FIG. 14A include: human serum albumin (HSA) (SEQ ID NO: 7), non-cleavable Linker (SEQ ID NO: 162), anti-CD3epsilon variable heavy chain and constant heavy chain region 1 (SEQ ID NO: 113), followed by two marked cysteine residues (marked bold and underline), which may participate in disulfide double bonds, followed by an anti-EGFR scFv VL (SEQ ID NO: 34)-linker (SEQ ID NO: 40)-VH (SEQ ID NO: 37) chain. FIG. 14B presents one embodiment of an optimized nucleic acid sequence (DNA) encoding a Heavy Chain (HC) polypeptide of the non-cleavable precursor tri-specific (tri-body) antibody construct, having the 5′ to 3′ order and components as follows (SEQ ID NO: 146). The nucleic acid sequences encoding the component parts of the HC polypeptide shown in FIG. 14A include: human serum albumin (HSA) (SEQ ID NO: 8), non-cleavable Linker (SEQ ID NO: 163), anti-CD3epsilon variable heavy chain and constant heavy chain region 1 (SEQ ID NO: 155), followed by two marked cysteine residues (marked bold and underline), which may participate in disulfide double bond, followed by an anti-EGFR scFv VL (SEQ ID NO: 36)-linker (SEQ ID NO: 40)-VH (SEQ ID NO: 38) chain.

[0100] FIGS. 15A and 15B present embodiments of an amino acid sequence of a Light Chain (LC) polypeptide of a non-cleavable precursor tri-specific (tri-body) antibody construct (Construct 5; VLVH) and an optimized nucleotide sequences encoding the Light Chain (LC) non-cleavable precursor construct. Amino acid sequences are presented N-terminal to C-terminal, and nucleic acid sequences are presented 5′ to 3′. FIG. 15A presents one embodiment of an amino acid sequence of a Light Chain (LC) polypeptide of a non-cleavable precursor construct, having the N-terminal to C-terminal order and components as follows: Cap-(h1F3.1-λLC anti-EGFR VL-linker-VH Non-Cleavable (SEQ ID NO: 135). The amino acid sequences of the component parts of the LC polypeptide shown in FIG. 15A include: CAP (SEQ ID NO: 5), non-cleavable Linker (SEQ ID NO: 162), anti-CD3epsilon variable light chain and lambda light chain (SEQ ID NO: 74), followed by marked cysteine residues (marked bold and underline), which may participate in a disulfide double bond, followed by an anti-EGFR scFv VL (SEQ ID NO: 34)-linker (SEQ ID NO: 40)-VH (SEQ ID NO: 37) chain. FIG. 15B presents one embodiment of an optimized nucleic acid sequence (DNA) encoding the Light Chain (LC) polypeptide of the non-cleavable precursor tri-specific (tri-body) antibody construct, having the 5′ to 3′ order and components as follows (SEQ ID NO: 147). The nucleic acid sequences encoding the component parts of the LC polypeptide shown in FIG. 13A include: CAP (SEQ ID NO: 164), non-cleavable Linker (SEQ ID NO: 163),anti-CD3epsilon variable light chain and lambda light chain region (SEQ ID NO: 159), followed by marked cysteine residues (marked bold and underline), which may participate in a disulfide double bond, followed by an anti-EGFR scFv VL (SEQ ID NO: 36)-linker (SEQ ID NO: 40)-VH (SEQ ID NO: 38) chain.

[0101] FIGS. 16A and 16B present embodiments of an amino acid sequence of a Heavy Chain (HC) polypeptide of a non-cleavable precursor tri-specific (tri-body) antibody construct (Construct 6; VHVL) and an optimized nucleotide sequences encoding the Heavy Chain (HC) non-cleavable precursor construct. Amino acid sequences are presented N-terminal to C-terminal, and nucleic acid sequences are presented 5′ to 3′. FIG. 16A presents one embodiment of an amino acid sequence of a Heavy Chain (HC) polypeptide of a non-cleavable precursor construct, having the N-terminal to C-terminal order and components as follows: hHSA-G-PLGLAG (NC)- (cloning)-h1F3.5-G1Fd-(VH-linker-VL) (SEQ ID NO: 136). The amino acid sequences of the component parts of the HC polypeptide shown in FIG. 16A include: human serum albumin (HSA) (SEQ ID NO: 7), non-cleavable Linker (SEQ ID NO: 162), anti-CD3epsilon variable heavy chain and constant heavy chain region 1 (SEQ ID NO: 113), followed by two marked cysteine residues (marked bold and underline), which may participate in disulfide double bonds, followed by an anti-EGFR scFv VH (SEQ ID NO: 37)-linker (SEQ ID NO: 40)-VL (SEQ ID NO: 34) chain. FIG. 16B presents one embodiment of an optimized nucleic acid sequence (DNA) encoding the Heavy Chain (HC) polypeptide of the non-cleavable precursor tri-specific (tri-body) antibody construct, having the 5′ to 3′ order and components as follows (SEQ ID NO: 148). The nucleic acid sequences encoding the component parts of the HC polypeptide shown in FIG. 16A include: human serum albumin (HSA) (SEQ ID NO: 8), non-cleavable Linker (SEQ ID NO: 163), anti-CD3epsilon variable heavy chain and constant heavy chain region 1 (SEQ ID NO: 155), followed by two marked cysteine residues (marked bold and underline), which may participate in disulfide double bond, followed by an anti-EGFR scFv VH (SEQ ID NO: 38)-linker (SEQ ID NO: 40)-VL (SEQ ID NO: 36) chain.

[0102] FIGS. 17A and 17B present embodiments of an amino acid sequence of a Light Chain (LC) polypeptide of a non-cleavable precursor tri-specific (tri-body) antibody construct (Construct 6; VLVH) and an optimized nucleotide sequences encoding the Light Chain (LC) non-cleavable precursor construct. Amino acid sequences are presented N-terminal to C-terminal, and nucleic acid sequences are presented 5′ to 3′. FIG. 17A presents one embodiment of an amino acid sequence of a Light Chain (LC) polypeptide of a precursor construct, having the N-terminal to C-terminal order and components as follows: Cap (NC)-h1F3.1-λLC- Anti-EGFR (VH-linker-V) (SEQ ID NO: 137). The amino acid sequences of the component parts of the LC polypeptide shown in FIG. 17A include: CAP (SEQ ID NO: 5), non-cleavable Linker (SEQ ID NO: 162), anti-CD3epsilon variable light chain and lambda light chain (SEQ ID NO: 74), followed by marked cysteine residues (marked bold and underline), which may participate in a disulfide double bond, followed by an anti-EGFR scFv VH (SEQ ID NO: 37)-linker (SEQ ID NO: 40)-VL (SEQ ID NO: 34) chain. FIG. 17B presents one embodiment of an optimized nucleic acid sequence (DNA) encoding the Light Chain (LC) polypeptide of the non-cleavable precursor tri-specific (tri-body) antibody construct, having the 5′ to 3′ order and components as follows (SEQ ID NO: 149). The nucleic acid sequences encoding the component parts of the LC polypeptide shown in FIG. 17A include: CAP (SEQ ID NO: 164), non-cleavable Linker (SEQ ID NO: 163), anti-CD3epsilon variable light chain and lambda light chain region (SEQ ID NO: 159), followed by marked cysteine residues (marked bold and underline), which may participate in a disulfide double bond, followed by an anti-EGFR scFv VH (SEQ ID NO: 38)-linker (SEQ ID NO: 40)-VL (SEQ ID NO: 36) chain.

[0103] FIGS. 18A-18B present embodiments of amino acid and nucleic acid sequences of scFv anti-ROR1 VL-VH. FIG. 18A presents one embodiment of an amino acid sequence of an scFv anti-ROR1 having the N-terminal to C-terminal order: VL-VH, and components as follows: anti-ROR1 VL, linker, and anti-ROR1 VH (SEQ ID NO: 156). FIG. 18B presents one embodiment of an optimized nucleic acid sequence encoding an scFv anti-ROR1 having the N-terminal to C-terminal order: VL-VH (SEQ ID NO: 157).

[0104] FIGS. 19A-19B present embodiments of amino acid and nucleic acid sequences of scFv anti-ROR1 VH-VL. FIG. 19A presents one embodiment of an amino acid sequence of an scFv anti-ROR1 having the N-terminal to C-terminal order: VH-VL, and components as follows: anti-ROR1 VH, linker, and anti-ROR1 VL (SEQ ID NO: 166). FIG. 19B presents one embodiment of an optimized nucleic acid sequence encoding an scFv anti-ROR1 having the N-terminal to C-terminal order: VH-VL (SEQ ID NO: 167).

[0105] FIGS. 20A-20B present embodiments of amino acid and nucleic acid sequences of scFv anti-PSMA VL-VH. FIG. 20A presents one embodiment of an amino acid sequence of an scFv anti-PSMA having the N-terminal to C-terminal order: VL-VH, and components as follows: anti-PSMA VL, linker, and anti-PSMA VH (SEQ ID NO: 168). FIG. 20B presents one embodiment of an optimized nucleic acid sequence encoding an scFv anti-PSMA having the N-terminal to C-terminal order: VL-VH (SEQ ID NO: 169).

[0106] FIGS. 21A-21B present embodiments of amino acid and nucleic acid sequences of scFv anti-PSMA VH-VL. FIG. 21A presents one embodiment of an amino acid sequence of an scFv anti-PSMA having the N-terminal to C-terminal order: VH-VL, and components as follows: anti-PSMA VH, linker, and anti-PSMA VL (SEQ ID NO: 170). FIG. 21B presents one embodiment of an optimized nucleic acid sequence encoding an scFv anti-PSMA having the N-terminal to C-terminal order: VH-VL (SEQ ID NO: 171).

[0107] FIGS. 22A-22B present embodiments of amino acid and nucleic acid sequences of scFv anti-5T4 VL-VH. FIG. 22A presents one embodiment of an amino acid sequence of an scFv anti-5T4 having the N-terminal to C-terminal order: VL-VH, and components as follows: anti-5T4 VL, linker, and anti-5T4 VH (SEQ ID NO: 172). FIG. 22B presents one embodiment of an optimized nucleic acid sequence encoding an scFv anti-5T4 having the N-terminal to C-terminal order: VL-VH (SEQ ID NO: 173).

[0108] FIGS. 23A-23B present embodiments of amino acid and nucleic acid sequences of scFv anti-5T4 VH-VL. FIG. 23A presents one embodiment of an amino acid sequence of an scFv anti-5T4 having the N-terminal to C-terminal order: VH-VL, and components as follows: anti-5T4 VH, linker, and anti-5T4 VL (SEQ ID NO: 174). FIG. 23B presents one embodiment of an optimized nucleic acid sequence encoding an scFv anti-5T4 having the N-terminal to C-terminal order: VH-VL (SEQ ID NO: 175).

[0109] FIGS. 24A-24B present embodiments of an amino acid sequence of a Heavy Chain (HC) polypeptide of precursor tri-specific (tri-body) antibody construct. Amino acid sequences are presented N-terminal to C-terminal. FIGS. 24A and 24B presents embodiments of an amino acid sequence of a Heavy Chain (HC) polypeptide of a precursor construct, having the N-terminal to C-terminal order and components as follows: CAP (Bold), linker (italicized), human serum albumin (underlined); protease cleavage sequence (bold and italicized); VH1/CH1 of anti-CD3e Fab (Bold and underlined), VL (italicized and underlined) VH (italicized, bold, and underlined) (EGFR scFv). The two marked cysteine residues (double underline), may participate in disulfide double bonds. The protease cleavage sequence in FIG. 24A is a multiple, protease cleavage sequence. The protease cleavage sequence in FIG. 24B is a MMP2/9 protease cleavage sequence. The amino acid sequence of FIG. 24A is set forth in SEQ ID NO: 28. The amino acid sequence of FIG. 24B is set forth in SEQ ID NO: 31. Embodiments of sequences of the component parts are described throughout this application.

[0110] FIG. 25 presents an embodiment of an amino acid sequence of a Light Chain (LC) polypeptide of a precursor tri-specific (tri-body) antibody construct. The amino acid sequence is presented N-terminal to C-terminal. FIG. 25 presents one embodiment of an amino acid sequence of a Light Chain (LC) polypeptide of a precursor construct, having the N-terminal to C-terminal order and components as follows: Linker (italicized), VL1-CL of anti-CD3e Fab (double underline and bold), VL (italicized and underlined), and VH (italicized bold and underlined) wherein the VH is an EGFR scFv). The two marked cysteine residues (double underline), may participate in disulfide double bonds. The amine acid sequence of the LC shown in FIG. 25 is set forth in SEQ ID NO: 32. Embodiments of amino acid sequences of the component parts of the LC polypeptide are described throughout the application.

[0111] FIGS. 26A-26B present embodiments of an amino acid sequence of a Heavy Chain (HC) polypeptide of precursor tri-specific (tri-body) antibody construct described herein. Amino acid sequences are presented N-terminal to C-terminal. FIGS. 26A and 26B presents embodiments of an amino acid sequence of a Heavy Chain (HC) polypeptide of a precursor construct, having the N-terminal to C-terminal order and components as follows: CAP (Bold), linker (italicized), human serum albumin (underlined); protease cleavage sequence (bold and italicized); VH1/CH1 of anti-CD3e Fab (Bold and underlined), VL (italicized and underlined) VH (italicized, bold, and underlined) (5T4 scFv). The two marked cysteine residues (double underline), may participate in disulfide double bonds. The protease cleavage sequence in FIG. 26A is a multiple, protease cleavage sequence. The protease cleavage sequence in FIG. 26B is a MMP2/9 protease cleavage sequence. The amino acid sequence of FIG. 26A is set forth in SEQ ID NO: 118. The amino acid sequence of FIG. 26B is set forth in SEQ ID NO: 176. Embodiments of sequences of the component parts are described throughout this application.

[0112] FIG. 27 presents an embodiment of an amino acid sequence of a Light Chain (LC) polypeptide of a precursor tri-specific (tri-body) antibody construct as described herein. The amino acid sequence is presented N-terminal to C-terminal. FIG. 27 presents one embodiment of an amino acid sequence of a Light Chain (LC) polypeptide of a precursor construct, having the N-terminal to C-terminal order and components as follows: Linker (italicized), VL1-CL of anti-CD3e Fab (double underline and bold), VL (italicized and underlined), and VH (italicized bold and underlined) wherein the VH is an 5T4 scFv) The two marked cysteine residues (double underline), may participate in disulfide double bonds. The amine acid sequence of the LC shown in FIG. 27 is set forth in SEQ ID NO: 177. Embodiments of amino acid sequences of the component parts of the LC polypeptide are described throughout the application.

[0113] FIG. 28 presents one embodiment of a precursor tri-specific antibody (tri-body) construct having antibody binding domains and regulatory domains as described herein, the Fab portion recognizes a CD3 surface antigen, one scFv recognizes a tumor associated antigen (TAA), and one scFv recognizes a NK cell surface antigen (e.g., NKG2A or NKG2D). The regulatory domain N-terminal to the Fab comprises a CAP domain, a HSA sequence, and a protease cleavable linker on the same polypeptide.

[0114] FIG. 29 presents another embodiment of the tri-body construct of FIG. 28, wherein the regulatory domain does not contain a protease cleavable linker.

[0115] FIG. 30 presents one embodiment of a precursor tri-specific antibody (tri-body) construct having antibody binding domains and regulatory domains as described herein, the Fab portion recognizes a CD3 surface antigen, one scFv recognizes a tumor associated antigen (TAA), and one scFv recognizes a NK cell surface antigen (e.g. NKG2A or NKG2D). The anti-NK scFv further comprises a regulatory domain comprising a CAP domain and a protease cleavable linker.

[0116] FIG. 31 presents one embodiment of a precursor tri-specific antibody (tri-body) construct having antibody binding domains and regulatory domains as described herein, the Fab portion recognizes a CD3 surface antigen, one scFv recognizes a tumor associated antigen (TAA), and one scFv recognizes a NK cell surface antigen (e.g. NKG2A or NKG2D). The anti-NK scFv and anti-CD3 Fab each further comprise a regulatory domain comprising a CAP domain without a protease cleavable linker.

[0117] FIG. 32 presents one embodiment of a precursor tri-specific antibody (tri-body) construct having antibody binding domains and regulatory domains as described herein, the Fab portion recognizes a CD3 surface antigen, one scFv recognizes a tumor associated antigen (TAA), and one scFv region comprising two scFv that recognize one or two NK cell surface antigen (e.g. NKG2A and/or NKG2D). The two scFv can bind the same or different NK cell surface antigens.

[0118] FIGS. 33A-33B present some other embodiments of the tri-body construct of FIG. 32, further having a regulatory domain N-terminal to the Fab comprising a CAP domain, a HSA sequence, and a protease cleavable linker on the same polypeptide. FIG. 33A shows the anti-TAA scFv is located C-terminal to the CL of the anti-CD3 Fab, whereas the 2 anti-NK scFvs are located C-terminal to the CH of the anti-CD3 Fab. FIG. 33B shows the anti-TAA scFv is located C-terminal to the CH of the anti-CD3 Fab, whereas the 2 anti-NK scFvs are located C-terminal to the CL of the anti-CD3 Fab. In either embodiment, the two scFv can bind the same or different NK cell surface antigens.

[0119] FIG. 34A presents another embodiment of the tri-body construct of FIG. 33A, wherein the regulatory domain does not contain a protease cleavable linker. FIG. 34B presents another embodiment of the tri-body construct of FIG. 33B, wherein the regulatory domain does not contain a protease cleavable linker.

[0120] FIG. 35 presents one embodiment of a precursor tri-specific antibody (tri-body) construct having antibody binding domains and regulatory domains as described herein, the Fab portion recognizes a CD3 surface antigen, one scFv recognizes a tumor associated antigen (TAA), and one binding domain comprising a cytokine receptor engager (e.g. IL-15).

[0121] FIG. 36 presents another embodiment of the tri-body construct of FIG. 35, further having a regulatory domain N-terminal to the Fab comprising a CAP domain, a HSA sequence, and a protease cleavable linker on the same polypeptide.

[0122] FIG. 37 presents another embodiment of the tri-body construct of FIG. 36, wherein the regulatory domain does not contain a protease cleavable linker.

[0123] FIG. 38A shows IM-1062 Tribody protein characterization by SDS-PAGE. FIG. 38B shows IM-1062 Tribody protein characterization by SEC-HPLC.

[0124] FIG. 39A shows IM-1184 ProTribody protein characterization by SDS-PAGE. FIG. 39B shows IM-1184 ProTribody protein characterization by SEC-HPLC.

[0125] FIGS. 40A-40C show MS analysis of IM-1062 Tribody. FIG. 40A shows MS analysis of light chain. FIG. 40B shows MS analysis of heavy chain. FIG. 40C shows MS analysis of intact Tribody.

[0126] FIGS. 41A-41B show MS analysis of IM-1184 ProTribody. FIG. 41A shows MS analysis of light chain. FIG. 41B shows MS analysis of heavy chain.

[0127] FIGS. 42A-42B show results of protease cleavage assay of various ProTribody constructs under non-reducing (FIG. 42A) or reducing condition (FIG. 42B). Lane M: Maker; Lane 1: CD⅗T4/NKG2A(VL-VH) (IM1062); Lane 2: Cap137_HSA_MC3_CD⅗T4/NKG2A (IM1188); Lane 3: IM1188+ Matriptase/ST14; Lane 4: IM1188+ MMMP-9; Lane 5: IM1188+UPA; Lane 6: Cap137_HSA_NC_CD⅗T4/NKG2A (IM1193); Lane 7: IM1193 + Matriptase/ST14; Lane 8: IM1193 + MMMP-9; Lane 9: IM1193+UPA; Lane 10: Cap137_HSA_NC_CD⅗T4/NKG2A (IM1193); Lane 11: IM1184 + MMMP-9; Lane 12: IM1184+UPA; Lane 13: Cap137_HSA_MC2_CD⅗T4/NKG2A (IM1184); Lane 14: CD⅗T4/NKG2A(VL-VH) (IM1062).

[0128] FIGS. 43A-43D show ELISA binding of various Tribody and Tribody mutants on recombinant protein CD3 (FIG. 43A), 5T4 (FIG. 43B), or NKG2A (FIGS. 43C-43D). FIG. 43D shows binding to human NKG2A by bi-NKG2A scFv Tribodies variants that harbors two anti NKG2A scFv in tandem (IM-1272, IM-1273).

[0129] FIGS. 44A-44C show ELISA binding of various cleaved and non-cleaved ProTribody on recombinant CD3 protein. FIG. 44A: IM-1184 ProTribody; FIG. 44B: IM-1188 ProTribody; FIG. 44C: IM-1193 ProTribody.

[0130] FIGS. 45A-45F show FACS binding of Tribody and Tribody mutants on different cell lines. FIG. 45A: Jurkat cells; FIG. 45B: NCI-H226 cells; FIG. 45C: NK92 cells; FIG. 45D: CHO cells over-expressing 5T4; FIG. 45E: CHO cells over-expressing NKG2A/CD94. FIG. 45F: CHO cells over expressing human NKG2A tested with the bi-NKG2A scFv Tribody variants that harbor two anti NKG2A scFv in tandem (IM-1272, IM-1273).

[0131] FIGS. 46A-46C show FACS binding of various cleaved and non-cleaved ProTribody on Jurkat cell line. FIG. 46A: IM-1184 ProTribody; FIG. 46B: IM-1188 ProTribody; FIG. 46C: IM-1193 ProTribody.

[0132] FIGS. 47A-47F show in vitro killing function of various Tribody and Tribody mutants. FIG. 47A: T cell-mediated cytotoxicity on NCI-H226 cells; FIG. 47B: NK92-mediated cytotoxicity against LCL721.221 cells; FIG. 47C: PBMC-mediated cytotoxicity on A549 cells; FIGS. 47D-F: PBMC-mediated cytotoxicity on MDA-MB231 cells with Tribody concentrations at 1pM or 10pM (FIG. 47D), 100 nM (FIG. 47E) or 100pM (FIG. 47F).

[0133] FIG. 48 shows IM-1062 Tribody induces IFNy secretion in various cell lines.

[0134] FIG. 49 shows the ability of various Tribody and Tribody mutants to block NKG2A-HLA interaction.

[0135] FIGS. 50A-50B show the in vivo efficacy of IM-1062 Tribody in MDA-MB-231 xenograft mouse model. FIG. 50A shows average tumor volume over time. FIG. 50B shows tumor volume of individual mice treated with vehicle control (left panel) or IM-1062 Tribody (right panel).

[0136] FIGS. 51A-51B show the in vivo efficacy of a IM-1062 Tribody and a Tribody mutant in the A549 tumor model. FIG. 51A shows average tumor volume over time. FIG. 51B shows tumor volume of individual mice treated with vehicle control (left panel), IM-1062 Tribody (middle panel), or IM-1093 Tribody (right panel).

[0137] FIGS. 52A-52B show the percentage of immune cells in a tumor microenvironment. FIG. 52A shows %CD45+ cells. FIG. 52B shows % activated CD3 cells.

[0138] FIGS. 53A-53C show the in vivo efficacy of IM-1062 Tribody on HCT116 cells. FIG. 53A shows average tumor volume over time. FIG. 53B shows tumor volume of individual mice treated with control (left panel) or IM-1062 Tribody (right panel). FIG. 53C shows the in vivo efficacy of IM-1062 Tribody, IM-1184 and IM-1193 ProTribody on MDA-MB-231 cells.

[0139] FIG. 54 lists the SEQ ID NOs for the various components of the Tribody or ProTribody construct, such as VH, VL, CDRs, regulatory domains, protease cleavage sequences, and linkers.

[0140] FIG. 55 lists the names and SEQ ID NOs of various embodiments of the Tribody or ProTribody constructs disclosed herein, each construct comprising polypeptide A (HC) and polypeptide B (LC). AA: amino acid sequence; NA: nucleotide sequence.

[0141] It will be appreciated that for simplicity and clarity of illustration, elements shown in the figures have not necessarily been drawn to scale. For example, the dimensions of some of the elements may be exaggerated relative to other elements for clarity. Further, where considered appropriate, reference numerals may be repeated among the figures to indicate corresponding or analogous elements.

### DETAILED DESCRIPTION OF THE INVENTION

[0142] In the following detailed description, numerous specific details are set forth in order to provide a thorough understanding of precursor tri-specific antibody constructs. However, it will be understood by those skilled in the art that the precursor constructs presented herein, the production of, and the use thereof may be practiced without these specific details. In other instances, well-known methods, procedures, and components have not been described in detail so as not to obscure the disclosure.

[0143] Described herein are precursor tri-specific antibody constructs comprising separate cleavable masking and half-life prolonging domains, wherein these cleavable regulatory domains provide reduced binding to T-cells or NK cells by the precursor tri-specific constructs when outside the tumor micro-environment (TME) and provide extended half-life. Half-life extension may be limited to the time a precursor tri-specific construct is outside the cancer microenvironment or it may extend to the time a precursor tri-specific construct resides within a cancer microenvironment. An advantage of the precursor tri-specific antibody constructs described herein, have a protease cleavable masking domain and a protease cleavable half-life prolonging (HLP) domain may be the improved protease-activated controlled release of the masking CAP and the HLP domain.

[0144] Reduction in T-cell or NK cell binding may lead to a reduction in T-cell or NK cell activation. In some embodiments, the precursor tri-specific antibody constructs described herein are regulatable precursor constructs. The regulatable precursor tri-specific antibody constructs describe herein may have an extended half-life, or reduced T-cell/NK cell binding, or reduced T-cell/NK cell activation, or any combination thereof.

[0145] As used herein, the terms “half-life prolonging”, “HLP”, “serum half-life prolonging”, “extended half-life”, “extended serum half-life”, “increased half-life”, “increased serum half-life”, and other similar terms may be used interchangeably having all the same qualities and meanings. In some embodiments, a half-life prolonging domain comprise a human serum albumin (HSA). As used herein, the term “human serum albumin” may in some embodiments be used interchangeably with “HSA” or “ALB” having all the same meanings and qualities.

[0146] In some embodiments, the precursor tri-specific antibody constructs described herein provide for a regulatable T-cell/NK cell activation, wherein the precursor construct provides that T-cell/NK cell activation is restricted to a tumor microenvironment. In some embodiments, the precursor tri-specific antibody construct described herein have an increased half-life and provide that T-cell/NK cell activation is restricted to a tumor microenvironment, compared with non-precursor always active multi-valent antibodies. In some embodiments, the precursor tri-specific antibody constructs described herein have reduced T-cell/NK cell activation in non-tumor microenvironments, compared with non-precursor always active multi-valent antibodies.

[0147] In some embodiments, the precursor tri-specific antibody constructs described herein have an extended half-life in non-tumor microenvironments, compared with non-precursor tri-specific antibodies. In some embodiments, the precursor tri-specific antibody constructs described herein have reduced T-cell/NK cell binding and/or activation in non-tumor microenvironments and an extended half-life in a non-tumor microenvironment, compared with non-precursor always active multi-valent antibodies.

[0148] In some embodiments, the precursor tri-specific antibody constructs described herein may bind to T-cells and to Natural Killer (NK) cells. In some embodiments, the precursor tri-specific antibody constructs described herein may bind to T-cells and to Natural Killer (NK) cells while also binding to a tumor associated antigen (TAA). In some embodiments, the precursor tri-specific antibody constructs described herein may bind to one NK cell surface antigen with one binding domain and bind to another NK cell surface antigen with another binding domain while also binding to a tumor associated antigen (TAA) with yet another binding domain. In some embodiments, the precursor tri-specific antibody constructs described herein may bind to one NK cell surface antigen with one binding domain and bind to a TAA with another binding domain while also carrying a cytokine receptor engager comprising an agent that binds to a cytokine receptor (e.g. the agent can be a cytokine such as IL-15). Examples of TAA and other antigens that can be recognized by the tri-specific antibody constructs are disclosed herein.

[0149] In some embodiments, described herein are pharmaceutical compositions comprising a precursor tri-specific antibody construct that provides a regulatable T-cell and/or NK cell activation in non-tumor microenvironments. In some embodiments, described herein are pharmaceutical compositions comprising a precursor tri-specific antibody construct having an increased half-life and providing that T-cell/NK cell activation is restricted to a tumor microenvironment. In some embodiments, described herein are pharmaceutical compositions comprising a precursor tri-specific antibody construct comprising an extended half-life in non-tumor microenvironments. In some embodiments, described herein are pharmaceutical compositions comprising a precursor tri-specific antibody construct comprising an extended half-life in non-tumor microenvironments, wherein the half-life is reduced in a tumor microenvironment compared with the half-life in a non-tumor microenvironment. In some embodiments, the pharmaceutical compositions comprising a precursor antibody construct that recognizes a T-cell, an NK cell, and a TAA. In some embodiments, the pharmaceutical compositions comprising a precursor antibody construct that recognizes two NK cell surface antigens and a TAA. In some embodiments, the pharmaceutical compositions comprising a precursor antibody construct having binding domains for a NK cell surface antigen, a TAA, and carrying a cytokine receptor engager comprising an agent that binds to a cytokine receptor (e.g. the engager can be a cytokine such as IL-15).

[0150] In some embodiment, described herein are methods of use of a precursor tri-specific antibody construct, as disclosed herein, for use treating, preventing, inhibiting the growth of, delaying disease progression, reducing the tumor load, or reducing the incidence of a cancer or tumor in a subject, or any combination thereof. In some embodiments, the method of treating disclosed herein reduces the minimal residual disease, increases remission, increases remission duration, reduces tumor relapse rate, prevents metastasis of the tumor or the cancer, or reduces the rate of metastasis of the tumor or the cancer, or any combination thereof, in the treated subject compared with a subject not administered with the pharmaceutical composition.

### Precursor Tri-specific Antibody Constructs

[0151] In some embodiments, a precursor tri-specific antibody construct comprises 1) a first binding domain binding to a TAA; 2) a second binding domain binding to an extracellular epitope of a Natural Killer (NK) cell antigen; 3) a third binding domain binding to a T cell surface antigen, e.g. an extracellular epitope of human CD3ε; and 4) a regulatory domain. The regulatory domain may comprise: (1) a first and a second sub-regulatory domain, the first sub-regulatory domain comprising a first protease cleavage domain and a half-life prolonging (HLP) domain, and the second sub-regulatory domain comprising a second protease cleavage domain and a CAP component that reduces the ability of the third binding domain to bind to its target antigen; or (2) a single regulatory domain comprising a protease cleavage domain, a half-life prolonging (HLP) domain, and a CAP component that reduces the ability of the third binding domain to bind to its target antigen. In one embodiment, when the second binding domain binds to a NK cell surface antigen, the second binding domain further comprises a third regulatory domain comprising a third protease cleavage domain and a CAP component that reduces the ability of the second binding domain to bind to the NK cell surface antigen.

[0152] In some embodiments, a precursor tri-specific antibody construct comprises 1) a first binding domain binding to a tumor associated antigen (TAA); 2) a second binding domain binding to an extracellular epitope of a first Natural Killer (NK) cell antigen; 3) a third binding domain binding to an extracellular epitope of a second NK cell surface antigen; and 4) a regulatory domain. The regulatory domain may comprise: (1) a first and a second sub-regulatory domain, the first sub-regulatory domain comprising a first protease cleavage domain and a half-life prolonging (HLP) domain, and the second sub-regulatory domain comprising a second protease cleavage domain and a CAP component that reduces the ability of the third binding domain to bind to its target antigen; or (2) a single regulatory domain comprising a protease cleavage domain, a half-life prolonging (HLP) domain, and a CAP component that reduces the ability of the third binding domain to bind to its target antigen. In one embodiment, when the second binding domain binds to a NK cell surface antigen, the second binding domain further comprises a third regulatory domain comprising a third protease cleavage domain and a CAP component that reduces the ability of the second binding domain to bind to the NK cell surface antigen. The first and second NK cell surface antigens can be the same or different antigens..

[0153] In some embodiments, a precursor tri-specific antibody construct comprises 1) a first binding domain binding to a tumor associated antigen (TAA); 2) a second binding domain having a cytokine receptor engager comprising an agent that binds to a cytokine receptor (e.g. the agent can be a cytokine such as IL-15); 3) a third binding domain binding to an extracellular epitope of a NK cell surface antigen; and 4) a regulatory domain. The regulatory domain may comprise: (1) a first and a second sub-regulatory domain, the first sub-regulatory domain comprising a first protease cleavage domain and a half-life prolonging (HLP) domain, and the second sub-regulatory domain comprising a second protease cleavage domain and a CAP component that reduces the ability of the third binding domain to bind to its target antigen; or (2) a single regulatory domain comprising a protease cleavage domain, a half-life prolonging (HLP) domain, and a CAP component that reduces the ability of the third binding domain to bind to its target antigen.

### Cytokine Receptor Engager

[0154] In some embodiments, a precursor tri-specific antibody construct comprises a binding domain having a cytokine receptor engager comprising an agent that binds to a cytokine receptor. In one embodiment, the cytokine receptor engager is a cytokine that binds to a cytokine receptor. As it is generally known in the art, cytokines is a general name; other names include lymphokine (cytokines made by lymphocytes), monokine (cytokines made by monocytes), chemokine (cytokines with chemotactic activities), and interleukin (cytokines made by one leukocyte and acting on other leukocytes). Cytokines may act on the cells that secrete them (autocrine action), on nearby cells (paracrine action), or in some instances on distant cells (endocrine action). Numerous cytokines are known in the art. There are pro-inflammatory cytokines and anti-inflammatory cytokines. Examples of pro-inflammatory cytokines include, but are not limited to, IL-1β, IL-6, IL-12, and TNF-α. Examples of anti-inflammatory cytokines include, but are not limited to, IL-1 receptor antagonist, IL-4, IL-10, IL-11, and IL-13. Depending on the circumstances, certain cytokines can be categorized as either anti-inflammatory or pro-inflammatory cytokines, for example, Leukemia inhibitory factor, interferon-alpha, IL-6, and transforming growth factor (TGF)-β. In one embodiment, the cytokine receptor engager is a pro-inflammatory cytokine. In another embodiment, the cytokine receptor engager is an anti-inflammatory cytokine.

[0155] In some embodiments, the cytokine receptor engager is a lymphokine. In some embodiments, the cytokine receptor engager is a monokine. In some embodiments, the cytokine receptor engager is a chemokine. In some embodiments, the cytokine receptor engager is a interleukin. In some embodiments, the cytokine receptor engager is a pro-inflammatory cytokine. In some embodiments, the cytokine receptor engager is an anti-inflammatory cytokine.

[0156] In some embodiments, a precursor tri-specific antibody construct comprises a binding domain having a cytokine receptor engager comprising an IL-15 molecule. In one embodiment, the cytokine receptor engager is a cytokine that binds to its cytokine receptor. Examples of cytokines have been disclosed herein. For example, the engager can be IL-15. In some embodiments, the IL-15 engager binds to IL-15 receptor. The cytokine can be from human or other non-human animals. The cytokine can be purified from native source, or constructed by recombinant techniques. In some embodiments, binding of the IL-15 engager domain to a target induces the proliferation of natural killer cells. It is known in the art that IL-15 plays important role on NK cell development and homeostasis without stimulating regulatory T cells. Results from clinical trials show that IL-15 administration was associated with a 38-fold increase in the number and activation status of circulating natural killer (NK) cells and activation of macrophages which together are ADCC effectors. Furthermore, IL-15 greatly enhanced the therapeutic efficacy of both rituximab and alemtuzumab in tumor models. In some embodiments, binding of the IL-15 engager domain to a target induces increase of the cytotoxic function of natural killer cells. In some embodiments, binding of the IL-15 engager domain to a target induces both the proliferation of natural killer cells and increases their cytotoxic function. In some embodiments, binding of the IL-15 engager domain to a target enhances the anti-tumor response by an activated precursor tri-specific antibody construct comprising an IL-15 engager. In some embodiments, binding of the IL-15 engager domain to a target enhances the efficacy in inducing tumor regression by an activated precursor tri-specific antibody construct comprising an IL-15 engager.

[0157] Regarding cytokine requirements for natural killer (NK) cell development and function, it is known that NK cell development from hematological stem cells (HSCs) is regulated by multiple cytokines in fetal liver, bone marrow, and thymus. The sequential expression of receptors for different cytokines implies functional maturation of NK cells. The proliferation and differentiation of HSCs requires FL (fms-like tyrosine kinase 3 ligand), KL (kit ligand), IL-3, and IL-7, which interact with their respective receptors. The acquisition of CD122 expression is indicative of the commitment of NK cells. IL-15 is indispensable for NK cell differentiation from common lymphoid progenitors to mature NK cells. Mature NK cells are shaped by cytokine signals from the diverse tissue environments in which they reside. In the peripheral blood or spleen, the abundance of stimulatory cytokines, such as IL-2, IL-12, IL-15, IL-18, and IL-21, may maintain NK cells in a cytotoxic state to combat infections. Tolerant NK cells that reside in the liver, and regulatory NK cells that reside in the uterus, are primarily regulated by TGF-β and IL-10 or by TGF-β and IL-15, respectively.

### Embodiments of Precursor Tri-specific Antibody Constructs

[0158] For the precursor constructs described throughout, the skilled artisan will appreciate that the modular structure of said constructs allows for different binding partners based on the amino acid sequences comprised in the first, second and third binding domains. In some embodiments, the first binding domain and the second binding domain each comprises a single chain variable fragment (scFv). In another embodiment, the third binding domain comprises a Fab antigen binding fragment.

[0159] In some embodiments, a binding domain comprises two scFv in tandem. For example, in some embodiments, a second binding domain comprises two scFv targeting NK cells. In some embodiments, the two scFv target the same antigen on an NK cell. In some embodiments, the two scFv target different antigens on an NK cell.

[0160] A skilled artisan would recognize that a precursor antibody construct is a precursor form or “Pro” form of the active antibody protein. In some embodiments, the term “Pro” is used interchangeably with the term “Precursor” having all the same meanings and qualities.

[0161] As used herein, the term “precursor tri-specific antibody” or “ProTribody antibody” refers to a tri-specific antibody comprising one or more regulatory domains that regulate antibody binding to one or more target antigens. (See for examples, FIGS. 32 and 33A-33B)

[0162] A skilled artisan would appreciate that as used throughout, in some embodiments the terms “precursor tri-specific antibody construct”, “precursor antibody”, “precursor construct”, “precursor antibody construct”, “precursor tri-specific antibody”, “tri-specific antibody”, “antibody”, “Tribody”, “tri-specific antibody construct”, and “tri-specific construct” may be used interchangeably having all the same qualities and meanings. Additionally, in some embodiments the term “tri-specific” may be replaced with the term “tri-body” or “Tribody” with the recognition that the antibody constructs disclosed herein have three binding regions, wherein each region may bind a different antigen (tri-body or tri-specific) or two of the three binding regions may bind the same antigen (tri-body or tri-specific wherein two of the specific binding antigens are the same). Thus, terms as listed above, for example “precursor tri-specific antibody construct” in some embodiments may be used interchangeably with the term “precursor tri-body construct”, having all the same meanings and qualities.

[0163] A skilled artisan would appreciate that in some embodiments, the term “tumor associated antigen” (TAA) may encompass a molecule or a portion thereof, which is displayed on the surface of a cell or a molecule which is present within the milieu of a tumor, that is within the tumor micro-environment. In some embodiments, a TAA encompasses a cell surface tumor associated antigen (TAA). In some embodiments, the cell is a tumor cell. In some embodiments, the cell is a non-tumor cell present in the milieu of a tumor, for example but not limited to a cell present within vasculature tissue associated with a tumor or cancer. In some embodiments, a TAA is an angiogenic antigen in a tumor micro-environment. In some embodiments, a TAA is an antigen on a blood vessel in a tumor micro-environment. In some embodiments, the cell is a stromal cells present in the milieu of a tumor. In some embodiments, a TAA is a stromal cell antigen within a tumor micro-environment. In some embodiments, a TAA encompasses an extracellular epitope of a tumor-cell-surface antigen. In some embodiments, a TAA encompasses an extracellular matrix antigen.

[0164] In some embodiments, an angiogenic antigen comprises a bFGF. In some embodiments, an angiogenic antigen comprises a INF. In some embodiments, an angiogenic antigen comprises a VEGF. In some embodiments, an angiogenic antigen comprises a bFGF, a INF, or a VEGF.

[0165] In some embodiments, a TAA comprises an antigen present in a TME. In some embodiments, a TAA comprises a cytokine antigen in a TME. In some embodiments, a TAA comprises a molecule secreted by a tumor cell into the TME. In some embodiments, a TAA comprises an effector molecule secreted by a tumor cell into the TME. In some embodiments, a TAA comprises an effector molecule secreted by a tumor cell into the TME in order to downregulate or inhibit the activity of cytotoxic natural killed (NK) cells. In some embodiments, a TAA comprises an effector molecule secreted by a tumor cell into the TME in order to downregulate or inhibit the activity of NK cells. In some embodiments, a TAA comprises soluble activating receptor ligand secreted by a tumor cell into the TME in order to block the recognition of the tumor cell by an NK cell. In some embodiments, a TAA comprises a suppressive immune cell in the TME that would otherwise inhibit NK cell activation. In some embodiments, a TAA comprises a suppressive molecule in the TME that would otherwise inhibit NK cell activation. In some embodiments, the effector molecule comprises a cytokine antigen. In some embodiments, the effector molecule comprises a cytokine antigen in the TME.

[0166] In some embodiments, a cytokine antigen in the TME comprises a TNF-alpha, an IL-6, a TGF-beta, an IL-10, an IL-8, an IL-17, an IL-21, an INF, or a VEGF. In some embodiments, a TAA is selected from a TNF-alpha, an IL-6, a TGF-beta, an IL-10, an IL-8, an IL-17, an IL-21, an INF, or an VEGF. In some embodiments, a cytokine antigen for use as a TAA comprises a cytokine antigen known in the art.

[0167] A skilled artisan would appreciate that the terms “tumor micro-environment” (TME), “cancer microenvironment” and “tumor milieu” may be used interchangeably having the same qualities and meanings and encompassing the microenvironment to tumor development. While the normal cellular microenvironment can inhibit malignant cell growth, the modifications that occur in the tumor microenvironment may synergistically support cell proliferation.

[0168] In some embodiments, the second binding domain and the third binding domain of a precursor construct disclosed herein bind to the same NK cell surface antigen. In some embodiments, the second binding domain and the third binding domain of a precursor construct disclosed herein bind to different NK cell surface antigens. In some embodiments, the second binding domain and the third binding domain of a precursor construct disclosed herein bind to the same or different NK cell surface antigens on the same cell. In some embodiments, the second binding domain and the third binding domain of a precursor construct disclosed herein bind to the same or different NK cell surface antigens on different NK cells.

[0169] In some embodiments, the second binding domain binds to an NK cell and the first binding domain binds to a TAA. The TAA may be for example, but not limited to an extracellular epitope of a tumor-cell surface antigen, a TME antigen, a stomal antigen in a TME, an angiogenic antigen in a TME, an antigen on a blood vessel in a TME, or a cytokine in a TME.

[0170] In some embodiments, binding to an NK cell comprises binding to an extracellular epitope of the NK cell antigen.

[0171] In some embodiments, the second binding domain binds to a negative effector molecule of an NK cell and the first binding domain binds to a TAA. The TAA may be for example, but not limited to an extracellular epitope of a tumor-cell surface antigen, a TME antigen, a stomal antigen in a TME, an angiogenic antigen in a TME, an antigen on a blood vessel in a TME, or a cytokine in a TME.

[0172] A skilled artisan would appreciate that the terms “antigen” or “immunogen” encompass a peptide, protein, or a polypeptide, or any fragment thereof, which is immunogenic. In some embodiments, an antigen is capable of eliciting an immune response in a mammal, and therefore contains at least one and may contain multiple epitopes. An “antigen” molecule or a portion of a molecule is capable of being bound by a selective binding agent, such as an antigen-binding portion of a Fab fragment or an antigen-binding portion of a single chain variable fragment (scFv). Additionally, an “antigen” is capable of being used in an animal to produce antibodies capable of binding to an epitope of that antigen. In some embodiments, a CAP component comprises the portion of an antigen to which a binding domain binds.

[0173] The term “epitope” includes any determinant, in certain embodiments, a polypeptide determinant, capable of specific binding to an anti-TAA binding domain or an anti-NK cell binding domain or an anti-T-cell receptor binding domain. An epitope is a region of an antigen that is bound by an antibody or an antigen-binding fragment thereof. In some embodiments, a CAP component comprises the epitope to which a binding domain binds.

[0174] In certain embodiments, epitope determinants include chemically active surface groupings of molecules such as amino acids, sugar side chains, phosphoryl or sulfonyl, and may in certain embodiments have specific three-dimensional structural characteristics, and/or specific charge characteristics. In certain embodiments, a precursor tri-specific antibody construct is said to specifically bind an antigen when it preferentially recognizes its target antigen in a complex mixture of proteins and/or macromolecules. A precursor tri-specific antibody construct is said to specifically bind an antigen when the equilibrium dissociation constant is ≤ 10⁻⁵, 10⁻⁶ or 10⁻⁷ M. In some embodiments, the equilibrium dissociation constant may be ≤ 10⁻⁸ M or 10⁻⁹ M. In some further embodiments, the equilibrium dissociation constant may be ≤ 10⁻¹⁰ M or 10⁻¹¹ M. Antigens disclosed herein included but are not limited to TAA, CAP components, NK cells, and immuno-effector molecules such as a human CD3 epsilon polypeptide.

[0175] In some embodiments, the tumor associated antigen (TAA) is a tumor antigen. In some embodiments, tumor antigens comprise those antigens are presented on tumor cells. In some embodiments, the tumor antigen is present on a cell of solid tumor. In some embodiments, the tumor antigen is a cancer antigen, present on a cell of a non-solid tumor.

[0176] In some embodiments, when the TAA is a tumor cell antigen, the tumor cell comprises a cell from a solid tumor. Solid tumors may be benign (not cancer), or malignant (cancer). Different types of solid tumors are named for the type of cells that form them. Examples of solid tumors are sarcomas, carcinomas, and lymphomas. In some embodiments, solid tumors are neoplasms (new growth of cells) or lesions (damage of anatomic structures or disturbance of physiological functions) formed by an abnormal growth of body tissue cells other than blood, bone marrow or lymphatic cells. In some embodiments, a solid tumor consists of an abnormal mass of cells which may stem from different tissue types such as liver, colon, breast, or lung, and which initially grows in the organ of its cellular origin. However, such cancers may spread to other organs through metastatic tumor growth in advanced stages of the disease.

[0177] In some embodiments, the solid tumor comprises a sarcoma or a carcinoma, a fibrosarcoma, a myxosarcoma, a liposarcoma, a chondrosarcoma, an osteogenic sarcoma, a chordoma, an angiosarcoma, an endotheliosarcoma, a lymphangiosarcoma, a lymphangioendotheliosarcoma, a synovioma, a mesothelioma, an Ewing’s tumor, a leiomyosarcoma, a rhabdomyosarcoma, a colon carcinoma, a pancreatic cancer or tumor, a breast cancer or tumor, an ovarian cancer or tumor, a prostate cancer or tumor, a squamous cell carcinoma, a basal cell carcinoma, an adenocarcinoma, a sweat gland carcinoma, a sebaceous gland carcinoma, a papillary carcinoma, a papillary adenocarcinomas, a cystadenocarcinoma, a medullary carcinoma, a bronchogenic carcinoma, a renal cell carcinoma, a hepatoma, a bile duct carcinoma, a choriocarcinoma, a seminoma, an embryonal carcinoma, a Wilm’s tumor, a cervical cancer or tumor, a uterine cancer or tumor, a testicular cancer or tumor, a lung carcinoma, a small cell lung carcinoma, a bladder carcinoma, an epithelial carcinoma, a glioma, an astrocytoma, a medulloblastoma, a craniopharyngioma, an ependymoma, a pinealoma, a hemangioblastoma, an acoustic neuroma, an oligodenroglioma, a schwannoma, a meningioma, a melanoma, a neuroblastoma, or a retinoblastoma. In some embodiments, the solid tumor comprises an Adrenocortical Tumor (Adenoma and Carcinoma), a Carcinoma, a Colorectal Carcinoma, a Desmoid Tumor, a Desmoplastic Small Round Cell Tumor, an Endocrine Tumor, an Ewing Sarcoma, a Germ Cell Tumor, a Hepatoblastoma a Hepatocellular Carcinoma, a Melanoma, a Neuroblastoma, an Osteosarcoma, a Retinoblastoma, a Rhabdomyosarcoma, a Soft Tissue Sarcoma Other Than Rhabdomyosarcoma, and a Wilms Tumor. In some embodiments, the solid tumor is a breast tumor. In another embodiment, the solid tumor is a prostate cancer. In another embodiment, the solid tumor is a colon cancer. In some embodiments, the tumor is a brain tumor. In another embodiment, the tumor is a pancreatic tumor. In another embodiment, the tumor is a colorectal tumor.

[0178] In some embodiments, the tumor cell comprises a cell from a non-solid tumor, that is a non-solid cancer. In some embodiments, a cancer may be a diffuse cancer, wherein the cancer is widely spread; not localized or confined. In some embodiments, a diffuse cancer may comprise a non-solid tumor. Examples of diffuse cancers include leukemias. Leukemias comprise a cancer that starts in blood-forming tissue, such as the bone marrow, and causes large numbers of abnormal blood cells to be produced and enter the bloodstream.

[0179] In some embodiments, a diffuse cancer comprises a B-cell malignancy. In some embodiments, the diffuse cancer comprises leukemia. In some embodiments, the cancer is lymphoma. In some embodiments, the lymphoma is large B-cell lymphoma.

[0180] In some embodiments, the diffuse cancer or tumor comprises a hematological tumor. In some embodiments, hematological tumors are cancer types affecting blood, bone marrow, and lymph nodes. Hematological tumors may derive from either of the two major blood cell lineages: myeloid and lymphoid cell lines. The myeloid cell line normally produces granulocytes, erythrocytes, thrombocytes, macrophages, and mast cells, whereas the lymphoid cell line produces B, T, NK and plasma cells. Lymphomas (e.g. Hodgkin’s Lymphoma), lymphocytic leukemias, and myeloma are derived from the lymphoid line, while acute and chronic myelogenous leukemia (AML, CML), myelodysplastic syndromes and myeloproliferative diseases are myeloid in origin.

[0181] In some embodiments, a non-solid (diffuse) cancer or tumor comprises a hematopoietic malignancy, a blood cell cancer, a leukemia, a myelodysplastic syndrome, a lymphoma, a multiple myeloma (a plasma cell myeloma), an acute lymphoblastic leukemia, an acute myelogenous leukemia, a chronic myelogenous leukemia, a Hodgkin lymphoma, a non-Hodgkin lymphoma, or plasma cell leukemia.

[0182] In some embodiments, the tumor or cancer comprises a metastasis of a tumor or cancer.

[0183] In some embodiments a cell surface TAA is located in or on the plasma membrane of the cell, such that at least part of this molecule remains accessible from outside the cell in tertiary form. In some embodiments, a cell surface TAA that is located in the plasma membrane is a transmembrane protein comprising, in its tertiary conformation, regions of hydrophilicity and hydrophobicity.

[0184] These antigens can be presented on the cell surface with an extracellular part which is often combined with a transmembrane and cytoplasmic part of the molecule. These antigens can sometimes be presented only by tumor cells and never by the normal ones. Tumor antigens can be exclusively expressed on tumor cells or might represent a tumor specific mutation compared to normal cells. In this case, they are called tumor-specific antigens. More common are antigens that are presented by tumor cells and normal cells. In some embodiments, TAA include antigens exclusively expressed on a tumor cell. In some embodiments, TAA include antigens expressed on both tumor and normal cells.

[0185] In some embodiments, TAA can be overexpressed on tumor cells compared to normal cells or are accessible for antibody binding in tumor cells due to the less compact structure of the tumor tissue compared to normal tissue.

[0186] In some embodiments, a precursor tri-specific antibody constructs described herein comprises (a) an scFv fragment comprising a first binding domain, binding to a TAA (TAA binding domain); (b) an scFv fragment comprising a second binding domain, binding to a NK cell antigen (NK cell binding domain); (c) an Fab fragment comprising a third binding domain, binding to an extracellular epitope of a T cell surface antigen such as human CD3ε (CD3 binding domain); and (d) a regulatory domain. The regulatory domain may comprise (1) a first and a second sub-regulatory domain, the first sub-regulatory domain comprising a first protease cleavage domain and a half-life prolonging (HLP) domain, and the second sub-regulatory domain comprising a second protease cleavage domain and a CAP component that reduces the ability of the third binding domain to bind to its target antigen; or (2) a single regulatory domain comprising a protease cleavage domain, a half-life prolonging (HLP) domain, and a CAP component that reduces the ability of the third binding domain to bind to its target antigen.

[0187] In some embodiments, a precursor tri-specific antibody constructs described herein comprises (a) an scFv fragment comprising a first binding domain, binding to a TAA (TAA binding domain); (b) an scFv fragment comprising a second binding domain, binding to a NK cell surface antigen, or the second binding domain comprises a cytokine receptor engager having an agent that binds to a cytokine receptor (e.g. the agent can be a cytokine such as IL-15); (c) an Fab fragment comprising a third binding domain, binding to an extracellular epitope of another NK cell antigen; and (d) a regulatory domain. In one embodiment, a The regulatory domain may comprise (1) a first and a second sub-regulatory domain, the first sub-regulatory domain comprising a first protease cleavage domain and a half-life prolonging (HLP) domain, and the second sub-regulatory domain comprising a second protease cleavage domain and a CAP component that reduces the ability of the third binding domain to bind to its target antigen; or (2) a single regulatory domain comprising a protease cleavage domain, a half-life prolonging (HLP) domain, and a CAP component that reduces the ability of the third binding domain to bind to its target antigen.

[0188] In some embodiments, when the second binding domain bind to an NK antigen, the precursor constructs further comprise additional regulatory domains linked to the second binding domain. For example, when the binding site binds to an NK antigen, in some embodiments, a third regulatory domain comprising a protease cleaving domain and a CAP component that reduces the ability of the second binding domain to bind the extracellular epitope of the NK is linked to the precursor construct C-terminal to the second binding domain and having the order N-terminal to C-terminal: Linker (L)-protease cleavage peptide-L-CAP. In some embodiments, the amino acid sequences of the CAP components that reduce the ability of the second and third binding domains to bind to their target NK cell antigens are the same. In some embodiments, the amino acid sequences of the CAP components that reduce the ability of the second and third binding domains to bind to their target NK cell antigens are different.

[0189] A skilled artisan would appreciate that in some embodiments, a precursor antibody construct encompasses a precursor or derivative form of a pharmaceutically active antibody. In some embodiments, a medicinal preparation comprises a precursor antibody construct. In some embodiments, a formulation comprises a precursor antibody construct. In some embodiments, a precursor antibody construct has reduced adverse effects compared to the activated antibody. In some embodiments, a precursor antibody construct has reduced adverse effects compared to the activated antibody, wherein the precursor antibody may be enzymatically activated or converted into the active form of the antibody.

[0190] In certain embodiments, a precursor antibody construct has a prolonged half-life compared to the activated antibody. In certain embodiments, a precursor antibody construct has a prolonged half-life compared to the activated antibody, wherein the precursor antibody may be enzymatically activated or converted into the active form of the antibody and the active form has a decreased half-life compared with the precursor antibody construct.

[0191] In some embodiments, a precursor antibody construct has reduced ability to bind a T-cell. In certain embodiments, a precursor antibody construct has a reduced ability to activate T-cells compared to the activated antibody. In some embodiments, a precursor antibody construct has reduced ability to bind a NK cell. In certain embodiments, a precursor antibody construct has a reduced ability to activate NK cells compared to the activated antibody, wherein the precursor antibody may be enzymatically activated or converted into the active form of the antibody.

[0192] In certain embodiments, a precursor antibody construct has both a prolonged half-life and a reduced ability to activate T-cells compared to the activated antibody. In certain embodiments, a precursor antibody construct has both a prolonged half-life and a reduced ability to bind NK cells compared to the activated antibody. In certain embodiments, a precursor antibody construct has both a prolonged half-life and a reduced ability to activate T-cells compared to the activated antibody, wherein the precursor antibody may be enzymatically activated or converted into the active form of the antibody. In certain embodiments, a precursor antibody construct has both a prolonged half-life and a reduced ability to bind NK cells compared to the activated antibody, wherein the precursor antibody may be enzymatically activated or converted into the active form of the antibody.

[0193] In some embodiments, a precursor antibody has reduced ability to bind a T-cell, wherein the regulatory domain comprising the CAP component is cleaved but the regulatory domain comprising the HLP has not been cleaved, wherein the “partially” activated antibody may bind to a T-cell and retain an extended half-life. In some embodiments, binding of a partially activated precursor antibody to a T-cell is reduced compared to a fully activated antibody that has both regulatory arms proteolytically cleaved. In some embodiments, a precursor antibody has reduced ability to activate a NK cell, wherein the regulatory domain comprising the CAP component is cleaved but the regulatory domain comprising the HLP has not been cleaved, wherein the “partially” activated antibody may activate a NK cell and retain an extended half-life. In some embodiments, activation of a NK cell is reduced following binding of a partially activated precursor construct, compared to a fully activated antibody that has both regulatory arms proteolytically cleaved.

[0194] In some embodiments, a precursor antibody construct is synthesized in vitro. In some embodiments, a precursor antibody construct is not converted to an active form of the antibody, when the precursor is present in vivo (e.g., in circulation) in a non-tumor microenvironment.

[0195] In some embodiments, a precursor antibody construct comprises multiple regulatory domains, in addition to antigen binding domains. In some embodiments, a precursor antibody construct comprises two regulatory domains, in addition to antigen binding domains. In some embodiments, a precursor antibody construct comprises enzymatically cleavable regulatory domains, in addition to antigen binding domains. In some embodiments, a precursor antibody construct comprises multiple regulatory domains in addition to antigen binding domains, wherein a portion of said regulatory domains is enzymatically cleavable. In some embodiments, a precursor antibody construct comprises two regulatory domains in addition to antigen binding domains, wherein a portion of said regulatory domains is enzymatically cleavable. In some embodiments, a precursor antibody construct comprises two regulatory domains in addition to three antigen binding domains, wherein said regulatory domains are enzymatically cleavable.

[0196] In some embodiments, a precursor tri-specific antibody described herein comprises enhanced selectivity at targeting tumor cells over normal cells prior to cytotoxic activation of T-cells or NK cells.

[0197] Immunological binding generally refers to the non-covalent interactions of the type which occur between an immunoglobulin molecule and an antigen for which the immunoglobulin is specific, for example by way of illustration and not limitation, as a result of electrostatic, ionic, hydrophilic and/or hydrophobic attractions or repulsion, steric forces, hydrogen bonding, van der Waals forces, and other interactions. The strength, or affinity of immunological binding interactions can be expressed in terms of the dissociation constant (K_{d}) of the interaction, wherein a smaller K_{d} represents a greater affinity. Immunological binding properties of selected polypeptides can be quantified using methods well known in the art. One such method entails measuring the rates of antigen-binding site/antigen complex formation and dissociation, wherein those rates depend on the concentrations of the complex partners, the affinity of the interaction, and on geometric parameters that equally influence the rate in both directions. Thus, both the “on rate constant” (kₒₙ) can be determined by calculation of the concentrations and the actual rates of association and the “off rate constant” (k_{off}) and can be determined by the actual rates of dissociation. The ratio of k_{off}/kₒₙ is thus equal to the dissociation constant K_{D}. See, generally, Davies et al. (1990) Annual Rev. Biochem. 59:439-473.

[0198] A skilled artisan would appreciate that a “binding domain” or related expressions such as a domain that “binds” or has “reactivity with/to” a specific target encompasses the ability of the domain to discriminate between the respective antigens and to specifically associate with a target antigen. A “binding domain” or “binding region” according to the present disclosure may be, for example, any protein, polypeptide, oligopeptide, or peptide that possesses the ability to specifically recognize and bind to a biological molecule (e.g., a cell surface receptor or tumor protein, or a component thereof, e.g., an extracellular component thereof). A binding domain includes any naturally occurring, synthetic, semi-synthetic, or recombinantly produced binding partner for a biological molecule of interest. For example, and as further described herein, a binding domain may be antibody light chain and heavy chain variable regions, or the light and heavy chain variable regions can be joined together in a single chain and in either orientation (e.g., VL-VH or VH-VL). A variety of assays are known for identifying binding domains of the present disclosure that specifically bind with a particular target, including Western blot, ELISA, flow cytometry, or surface plasmon resonance analysis (e.g., using BIACORE.TM. analysis).

[0199] In some embodiments, binding domain or a portion thereof “specifically binds” to a target molecule if it binds to or associates with a target molecule with an affinity or Ka (i.e., an equilibrium association constant of a particular binding interaction with units of ⅟M) of, for example, greater than or equal to about 10⁵M⁻¹. In certain embodiments, a binding domain or a portion thereof binds to a target with a Kₐ greater than or equal to about 10⁶ M⁻¹, 10⁷ M⁻¹, 10⁸ M⁻¹, 10⁹ M⁻¹, 10¹⁰ M⁻¹, 10¹¹ M⁻¹, 10¹² M⁻¹, or 10¹³ M⁻¹, “High affinity” binding domains may encompass those binding domains with a Kₐ of at least 10⁷ M⁻¹, at least 10⁸ M⁻¹, at least 10⁹ M⁻¹, at least 10¹⁰ M⁻¹, at least 10¹¹ M⁻¹, at least 10¹² M⁻¹, at least 10¹³ M⁻¹, or greater. Alternatively, affinity may be defined as an equilibrium dissociation constant (Kd) of a particular binding interaction with units of M (e.g., 10⁻⁵ M to 10⁻¹³ M, or less). Affinities of binding domain polypeptides and portions thereof, as described herein can be readily determined using conventional techniques (see, e.g., Scatchard et al. (1949) Ann. N.Y. Acad. Sci. 51:660; and U.S. Pat. Nos. 5,283,173; 5,468,614, or the equivalent, which are incorporated herein in full).

[0200] Illustrative binding domains are described herein. In certain embodiments, the target molecule may be a cell surface expressed protein, such as a receptor or a tumor antigen. In some embodiments, the target molecule is a tumor associated antigen (TAA). In some embodiments, the target molecule is a surface antigen of a Natural Killer (NK) cell. Illustrative binding domains include immunoglobulin antigen-binding domains such as scFv, scTCR, extracellular domains of receptors, ligands for cell surface molecules/receptors, or receptor binding domains thereof, and tumor binding proteins. In certain embodiments, the antigen binding domains can be an scFv, a VH, a VL, a domain antibody variant (dAb), a camelid antibody (VHH), a fibronectin 3 domain variant, an ankyrin repeat variant and other antigen-specific binding domain derived from other protein scaffolds (Owen, B. (2017) Nat Biotechnol Jul 12:35(7):602-603).

[0201] Thus, in certain embodiments, a binding domain comprises an antibody-derived binding domain but can be a non-antibody derived binding domain. An antibody-derived binding domain can be a fragment of an antibody or a genetically engineered product of one or more fragments of the antibody, which fragment is involved in binding with the antigen. Examples include, without limitation, a complementarity determining region (CDR), a variable region (Fv), a heavy chain variable region (VH), a light chain variable region (VL), a heavy chain, a light chain, a single chain variable region (scFv), a Fab, a single domain camel antibody (camelid VHH), and single domain antibodies (dAb).

[0202] FIG. 1 shows flow diagrams of protease specific activation within tumor tissue or within a tumor environment of precursor tri-specific antibody constructs, wherein T cell and/or NK cell engagement and activation is limited to tumor sites. In one embodiment, the precursor tri-specific antibody construct comprises binding sites to T cells and NK cells. These binding sites are blocked or masked in the precursor antibody (the Pro-form). Entry into a cancer microenvironment, which is known to be rich in cancer-cell secreted proteases, results in protease cleavage and removable of the masking moieties. In some embodiments, the protease cleavable masking moieties may be cleavable by the same or difference proteases. The resultant activated antibody (activated tri-specific antibody construct) may now bind and activate T cell and NK cell. Were the precursor construct to bind to a tumor associated antigen (TAA) not in a tumor microenvironment, protease cleavage would not occur, and neither would activation of the tri-specific antibody. The activated tri-specific antibody construct antibody has a reduced half-life of hours compared with days to weeks for the precursor tri-specific antibody construct (data not shown). Furthermore, in some embodiments, a cleaved and activated tri-specific antibody comprises a smaller size than the precursor construct, which may improve tumor penetration of the activated tri-specific antibody.

[0203] FIGS. 2-5 and 28-37 present schematic embodiments of precursor tri-specific (tri-body) antibody constructs having modular components, for example but not limited to: (1) modular regulatory domains including in certain embodiments, modular functional components and modular protease cleavage peptides, and (2) modular binding domains including in certain embodiments modular anti-tumor associated antigen binding domains, modular anti-T cell extracellular antigen binding domains, and modular anti-Natural Killer (NK) cell extracellular antigen binding domains.

[0204] FIG. 2A presents one embodiment of a precursor tri-specific antibody (tri-body) construct having three antibody binding domains, the Fab portion recognizes a CD3 surface antigen, one scFv recognizes a TAA, and the other scFv recognizes a NK cell surface antigen. In the embodiment shown here, the precursor tri-body construct is formed by two polypeptides. The anti-TAA and anti-NK binding domains are C-terminal to the anti-CD3 Fab binding domain. Furthermore, each polypeptide includes a regulatory domain N-terminal to the anti-CD3 Fab binding domain, wherein a first sub-regulatory domain comprises a protease cleavage domain and a serum half-life prolonging domain (in this embodiment, a human serum albumin HSA), and a second sub-regulatory domain comprising a protease cleavage domain and a CAP component that reduces the ability of the Fab binding domain to bind the surface antigen of CD3. In embodiments not shown, the two sub-regulatory domains N-terminal to the Fab region could be linked to a polypeptide chain different from the one shown here, for example the HSA regulatory domain could be linked N-terminal to the Light chain variable region (VL1) of the Fab fragment and the CAP regulatory domain could be linked N-terminal to the Heavy chain variable region (VH1) of the Fab fragment. As shown here, the anti-TAA and anti-NK cell binding domains are single chain variable fragments (scFv). In one embodiment, the N-terminal to C-terminal order of one of the scFv is a Light chain variable region (VL2) followed by a linker (L4) followed by a Heavy chain variable region (VH2) followed by a linker (L5), while the N-terminal to C-terminal order of the other scFv is a Heavy chain variable region (VH3) followed by a linker (L9) followed by a Light chain variable region (VL3) followed by a linker (L10). The order of the light chain variable region (VL) and heavy chain variable region (VH) regions for the two scFv domains, from N-terminal to C-terminal, may be different from one another (as shown here), or be the same as one another (not shown). The linkers between components and between domains are identified by an “L” followed by a numeral, e.g., L1, L2, L3, L4, L5, L6, L7, L8, L9, L10. Linkers may or may not be present. VL1 is a variable light-chain region of the Fab binding site, VH1 is a variable heavy-chain region of the Fab binding site. The oval shape indicated as HSA is the human serum albumin component. The shape indicated as CP is the protease cleavable peptide. The triangle shape is the CAP component.

[0205] FIG. 2B presents another embodiment of the precursor tri-specific antibody (tri-body) construct of FIG. 2A, showing a different order of VH, VL in the scFv domains. As shown here, the anti-TAA and anti-NK cell binding domains are single chain variable fragments (scFv). In one embodiment, the N-terminal to C-terminal order of one of the scFv is a Variable Heavy chain region (VH2) followed by a linker (L4) followed by a Variable Light chain region (VL2) followed by a linker (L5), while the N-terminal to C-terminal order of the other scFv is a Variable Light chain region (VL3) followed by a linker (L9) followed by a Variable Heavy chain region (VH3) followed by a linker (L10). Other components in the figure are the same as in FIG. 2A.

[0206] FIG. 2C presents one embodiment of a precursor tri-specific antibody construct as described above, having the regulatory domain comprising a CAP component that reduces the ability of the Fab binding domain to bind its target, but lacking the regulatory domain comprising the serum half-life extending component (HSA).

[0207] FIG. 2D presents one embodiment of a precursor tri-specific antibody construct as described above, having the regulatory domain comprising the serum half-life extending component (HSA), but lacking the regulatory domain comprising the CAP domain that reduces the ability of the Fab binding domain to bind its target.

[0208] FIG. 2E presents one embodiment of an active tri-specific (tribody) antibody construct derived from the precursor tri-specific antibody construct as described above, wherein the active construct lacks the two regulatory domains having the serum half-life extending component and the CAP domain.

[0209] FIG. 2F presents one embodiment of a precursor tri-specific antibody construct as described above, wherein the regulatory domain N-terminal to the Fab comprises a single regulatory domain comprising a CAP domain, a HSA sequence, and a protease cleavable linker on the same polypeptide.

[0210] FIG. 3A presents one embodiment of a precursor tri-specific antibody (tri-body) having regulated anti-T cell and anti-NK cell binding. The precursor construct comprises three antibody binding domains, the Fab portion recognizes a CD3 surface antigen, one scFv recognizes a TAA, and the other scFv recognizes a NK cell surface antigen. In the embodiment shown here, the precursor tri-body construct is formed by two polypeptides. The anti-TAA and anti-NK binding domains are C-terminal to the anti-CD3 Fab binding domain as described above. In one embodiment, the anti-NK binding domain may further include a regulatory module (third regulatory domain) comprising linkers (L10, L11), a protease cleavable peptide (CP) domain, and a CAP component that reduces the ability of the anti-NK binding domain to bind the surface antigen of an NK cell. There are regulatory domains N-terminal to the anti-CD3 Fab binding domain as described above. In the embodiment shown here, the anti-TAA binding domain and the anti-NK antigen binding domain are each single chain variable fragments (scFv). In the embodiment shown here for the anti-TAA-scFv, the N-terminal to C-terminal order is a Variable Light chain region (VL2) followed by a linker (L4) followed by a Variable Heavy chain region (VH2) followed by a linker (L5) while the N-terminal to C-terminal order of the anti-NK-scFv is a Variable Heavy chain region (VH3) followed by a linker (L9) followed by a Variable Light chain region (VL3) followed by a linker (L10) followed by protease cleavable domain, linker (L11) which is followed by a CAP component that reduces the ability of the anti-NK binding domain to bind a surface antigen on an NK cell. The order of the light chain variable (VL) and heavy chain variable (VH) regions for the two scFv domains, from N-terminal to C-terminal, may be different from one another (as shown here), or be the same as one another (not shown). In embodiments not shown, the two sub-regulatory domains N-terminal to the Fab region could be linked to a polypeptide chain different from the one shown here, for example the HSA regulatory domain could be linked N-terminal to the Light chain variable region (VL1) of the Fab fragment and the CAP regulatory domain could be linked N-terminal to the Heavy chain variable region (VH1) of the Fab fragment. Other components are the same as described above.

[0211] FIG. 3B presents another embodiment of a precursor tri-specific antibody construct having regulated anti-T cell and anti-NK cell binding, wherein the regulatory domain N-terminal to the Fab comprises a single regulatory domain comprising a CAP domain, a HSA sequence, and a protease cleavable linker on the same polypeptide. The precursor tri-specific antibody (tri-body) construct has three antibody binding domains, the Fab portion recognizes a CD3 surface antigen, one scFv recognizes a TAA, and the other scFv recognizes a NK cell surface antigen as described above. The regulatory domain N-terminal to the anti-CD3 Fab binding domain comprises a single regulatory domain comprising a protease cleavage domain, a serum half-life prolonging (HLP) domain, and a CAP component that reduces the ability of the Fab to bind to its target antigen. In the embodiment shown here for the anti-TAA-scFv, the N-terminal to C-terminal order is a Variable Heavy chain region (VH2) followed by a linker (L4) followed by a Variable Light chain region (VL2) followed by a linker (L5) while the N-terminal to C-terminal order of the anti-NK-scFv is a Variable Light chain region (VL3) followed by a linker (L9) followed by a Variable Heavy chain region (VH3) followed by a linker (L10) followed by protease cleavable domain, linker (L11) which is followed by a CAP component that reduces the ability of the anti-NK binding domain to bind a surface antigen on an NK cell. In embodiments not shown, the regulatory domains N-terminal to the Fab region could be linked to a polypeptide chain different from the one shown here, for example the HSA/CAP regulatory domain could be linked N-terminal to the Variable Light chain (VL1) of the Fab fragment.

[0212] FIG. 3C presents one embodiment of a precursor tri-specific antibody construct having the regulatory domain comprising a CAP component that reduces the ability of the Fab binding domain to bind its target, but lacking the regulatory domain comprising the serum half-life extending component (HSA). The Fab portion, the anti-TAA scFv and the anti-NK scFv are the same as shown in FIG. 3B.

[0213] FIG. 3D presents one embodiment of a precursor tri-specific antibody construct having the serum half-life extending component (HSA), but lacking the regulatory domain comprising a CAP component that reduces the ability of the Fab binding domain to bind its target. The Fab portion, the anti-TAA scFv and the anti-NK scFv are the same as shown in FIG. 3B.

[0214] FIG. 3E presents one embodiment of an active tri-specific (tribody) antibody construct, lacking the two regulatory domains that include the serum half-life extending component and the CAP domain. The Fab portion, the anti-TAA scFv and the anti-NK scFv are the same as shown in FIG. 3B.

[0215] FIG. 4A presents one embodiment of a precursor tri-specific antibody (tri-body) construct having a cytokine receptor engager. The precursor construct also comprises regulatory domains all contained in one polypeptide chain. The precursor construct comprises a Fab portion recognizing a NK cell surface antigen (e.g. NKG2A or NKG2D etc), an anti-TAA scFv, and a cytokine receptor engager (e.g. IL-15). In the embodiment shown here, the precursor tri-body construct is formed by two polypeptides. The anti-TAA scFv and the cytokine receptor engager are located C-terminal to the Fab region. The regulatory domain N-terminal to the Fab comprises a single regulatory domain comprising a CAP domain, a HSA sequence, and a protease cleavable linker on the same polypeptide. In the embodiment shown here for the anti-TAA-scFv, the N-terminal to C-terminal order is a Variable Heavy chain region (VH2) followed by a linker (L4) followed by a Variable Light chain region (VL2) followed by a linker (L5). In embodiments not shown, the N-terminal to C-terminal order of the anti-TAA scFv may be reversed, i.e. VL2-L4-VH2-L5. In embodiments not shown, the regulatory domains N-terminal to the Fab region could be linked to a polypeptide chain different from the one shown here, for example the HSA/CAP regulatory domain could be linked N-terminal to the Variable Light chain (VL1) of the Fab fragment. Other components in the figure are the same as those shown above.

[0216] FIG. 4B presents another embodiment of a precursor tri-specific antibody construct having a cytokine receptor engager. The precursor construct comprises a Fab portion recognizing a NK cell surface antigen (e.g. NKG2A or NKG2D etc), an anti-TAA scFv, and a cytokine receptor engager (e.g. IL-15). In the embodiment shown here, the precursor tri-body construct is formed by two polypeptides. The anti-TAA scFv and the cytokine receptor engager are located C-terminal to the Fab region. Each polypeptide includes a regulatory domain N-terminal to the Fab binding domain, wherein a first sub-regulatory domain comprises a protease cleavage domain and a half-life prolonging domain (in this embodiment, a human serum albumin HSA), and a second sub-regulatory domain comprising a protease cleavage domain and a CAP component that reduces the ability of the Fab binding domain to bind its target. In embodiments not shown, the two sub-regulatory domains N-terminal to the Fab region could be linked to a polypeptide chain different from the one shown here, for example the HSA regulatory domain could be linked N-terminal to the Variable Light chain (VL1) of the Fab fragment and the CAP regulatory domain could be linked N-terminal to the Heavy chain variable region (VH1) of the Fab fragment. In the embodiment shown here for the anti-TAA-scFv, the N-terminal to C-terminal order is a Light chain variable region (VL2) followed by a linker (L4) followed by a Heavy chain variable region (VH2) followed by a linker (L5). In embodiments not shown, the N-terminal to C-terminal order of the anti-TAA scFv may be reversed, i.e. VH2-L4-VL2-L5. Other components in the figure are the same as those shown above.

[0217] FIG. 4C presents one embodiment of an active tri-specific (tribody) antibody construct derived from the precursor construct of FIG. 4A.

[0218] FIG. 5A presents one embodiment of a precursor tri-specific antibody (tri-body) construct having dual specificities to NK cells, both with regulated anti-NK cell binding. The precursor construct comprises three antibody binding domains, the Fab portion recognizes a Natural Killer (NK) cell surface antigen (e.g. NKG2D), a scFv recognizes a TAA, and another scFv recognizes another NK cell surface antigen (e.g. NKG2A). In the embodiment shown here, the precursor tri-body construct is formed by two polypeptides, the two scFv binding domains are C-terminal to the anti-NK Fab binding domain. In one embodiment, the anti-NK scFv binding domain may further include a regulatory module (third regulatory domain) comprising linkers (L10, L11), a protease cleavable peptide (CP) domain, and a CAP component that reduces the ability of the anti-NK binding domain to bind the surface antigen of a NK cell. There are regulatory domains N-terminal to the anti-NK Fab binding domain, wherein a first sub-regulatory domain comprises a protease cleavage domain and a half-life prolonging domain (in this embodiment, a human serum albumin HSA), and a second sub-regulatory domain comprising a protease cleavage domain and a CAP component that reduces the ability of the Fab binding domain to bind its target. In embodiments not shown, the two sub-regulatory domains N-terminal to the Fab region could be linked to a polypeptide chain different from the one shown here, for example the HSA regulatory domain could be linked N-terminal to the Light chain variable region (VL1) of the Fab fragment and the CAP regulatory domain could be linked N-terminal to the Heavy chain variable region (VH1) of the Fab fragment. In the embodiment shown here for the anti-TAA-scFv, the N-terminal to C-terminal order is a Light chain variable region (VL2) followed by a linker (L4) followed by a Heavy chain variable region (VH2) followed by a linker (L5), whereas the N-terminal to C-terminal order of the anti-NK-scFv is a Heavy chain variable region (VH3) followed by a linker (L9) followed by a Light chain variable region (VL3) followed by a linker (L10) followed by protease cleavable domain, linker (L11) which is followed by a CAP component that reduces the ability of the anti-NK binding domain to bind a surface antigen on an NK cell. The order of the light chain variable (VL) and heavy chain variable (VH) regions for the two scFv domains, from N-terminal to C-terminal, may be different from one another (as shown here), or be the same as one another (not shown).

[0219] FIG. 5B presents another embodiment of a precursor tri-specific antibody construct of FIG. 5A, wherein the Fab portion recognizes a Natural Killer (NK) cell surface antigen (e.g. NKG2A), a scFv recognizes a TAA, and another scFv recognizes another NK cell surface antigen (e.g. NKG2D). Other components in the figure are the same as those in FIG. 5A.

[0220] FIG. 5C presents one embodiment of an active tri-specific (tribody) antibody construct having dual specificities to NK cells, both with regulated anti-NK cell binding, wherein the regulatory domain N-terminal to the Fab comprises a single regulatory domain comprising a CAP domain, a HSA sequence, and a protease cleavable linker on the same polypeptide. The precursor construct comprises three antibody binding domains, the Fab portion recognizes a Natural Killer (NK) cell surface antigen (e.g. NKG2D), a scFv recognizes a TAA, and another scFv recognizes another NK cell surface antigen (e.g. NKG2A). In the embodiment shown here, the precursor tri-body construct is formed by two polypeptides, The two scFv binding domains are C-terminal to the anti-NK Fab binding domain. In one embodiment, the anti-NK scFv binding domain may further include a regulatory module (third regulatory domain) comprising linkers (L10, L11), a protease cleavable peptide (CP) domain, and a CAP component that reduces the ability of the anti-NK binding domain to bind the surface antigen of a NK cell. The regulatory domain N-terminal to the Fab comprises a single regulatory domain comprising a CAP domain, a HSA sequence, and a protease cleavable linker on the same polypeptide. In embodiments not shown, the regulatory domains N-terminal to the Fab region could be linked to a polypeptide chain different from the one shown here, for example the HSA/CAP regulatory domain could be linked N-terminal to the Variable Light chain (VL1) of the Fab fragment. In the embodiment shown here for the anti-TAA-scFv, the N-terminal to C-terminal order is a Variable Heavy chain region (VH2) followed by a linker (L4) followed by a Variable Light chain region (VL2) followed by a linker (L5), whereas the N-terminal to C-terminal order of the anti-NK-scFv is a Variable Light chain region (VL3) followed by a linker (L9) followed by a Variable Heavy chain region (VH3) followed by a linker (L10) followed by protease cleavable domain, linker (L11) which is followed by a CAP component that reduces the ability of the anti-NK binding domain to bind a surface antigen on an NK cell. The order of the light chain variable (VL) and heavy chain variable (VH) regions for the two scFv domains, from N-terminal to C-terminal, may be different from one another (as shown here), or be the same as one another (not shown).

[0221] FIG. 5D presents another embodiment of a precursor tri-specific antibody construct of FIG. 5C, wherein the Fab portion recognizes a Natural Killer (NK) cell surface antigen (e.g. NKG2A), a scFv recognizes a TAA, and another scFv recognizes another NK cell surface antigen (e.g. NKG2D). Other components in the figure are the same as those in FIG. 5C.

[0222] FIG. 5E presents one embodiment of an active tri-specific (tribody) antibody construct derived from the precursor of FIG. 5C, wherein the regulatory domains N-terminal to the Fab domain and the regulatory domain linked to the anti-NK scFv have all been removed.

[0223] FIG. 5F presents one embodiment of an active tri-specific (tribody) antibody construct derived from the precursor of FIG. 5D, wherein the regulatory domains N-terminal to the Fab domain and the regulatory domain linked to the anti-NK scFv have all been removed.

[0224] FIG. 28 presents one embodiment of a precursor tri-specific antibody (Tribody) construct having antibody binding domains and regulatory domains as described herein, the Fab portion recognizes a CD3 surface antigen, one scFv recognizes a tumor associated antigen (TAA), and one scFv recognizes a NK cell surface antigen (e.g. NKG2A or NKG2D). The regulatory domain N-terminal to the Fab comprises a CAP domain, a HSA sequence, and a protease cleavable linker on the same polypeptide. The principles and description discussed in the embodiments above also apply to the embodiments disclosed herein and below. For example, as discussed above, the regulatory domain in this embodiment can be N-terminal to the VH or VL region of the Fab; and the VH and VL of the scFv can be in the order of, from N-terminal to C-terminal, VH-VL or VL-VH as discussed above.

[0225] FIG. 29 presents another embodiment of the Tribody construct of FIG. 28, in that the regulatory domain comprises a CAP domain that inhibits binding to CD3 and a HSA sequence without a protease cleavable linker. As discussed above, there are a number of permutations on arranging the various components of the Tribody construct; for example, the regulatory domain in this embodiment can be N-terminal to the VH or VL region of the Fab; and/or the VH and VL of the scFv can be in the order of, from N-terminal to C-terminal, VH-VL or VL-VH as discussed above.

[0226] FIG. 30 presents one embodiment of a precursor Tribody construct having antibody binding domains and regulatory domains as described herein, the Fab portion recognizes a CD3 surface antigen, one scFv recognizes a tumor associated antigen (TAA), and one scFv recognizes a NK cell surface antigen (e.g. NKG2A or NKG2D). The anti-NK scFv further comprises a regulatory domain comprising a protease cleavable linker and a CAP domain that inhibits binding to the NK cell surface antigen. As discussed above, the VH and VL in each of the scFv can be in the order of, from N-terminal to C-terminal, VH-VL or VL-VH.

[0227] FIG. 31 presents one embodiment of a precursor Tribody construct having antibody binding domains and regulatory domains as described herein, the Fab portion recognizes a CD3 surface antigen, one scFv recognizes a tumor associated antigen (TAA), and one scFv recognizes a NK cell surface antigen (e.g. NKG2A or NKG2D). The Fab portion further comprises a regulatory domain comprising a CAP domain that inhibits binding to CD3, and the anti-NK scFv further comprises a CAP domain that inhibits binding to the NK cell surface antigen. In one embodiment, one or both of the regulatory domains do not comprise a protease cleavable linker. In another embodiment, one or both of the regulatory domains may further comprise a protease cleavable linker. Moreover, other permutations discussed above can also be applied here; for example, the regulatory domain N-terminal to the Fab can be linked to the VH or VL of the Fab; and/or the VH and VL in each of the scFv can be in the order of, from N-terminal to C-terminal, VH-VL or VL-VH.

[0228] FIG. 32 presents one embodiment of a precursor Tribody construct having antibody binding domains and regulatory domains as described herein, the Fab portion recognizes a CD3 surface antigen, one scFv recognizes a tumor associated antigen (TAA), and one scFv region comprising two scFvs that recognize one or two NK cell surface antigen (e.g. NKG2A and/or NKG2D). As discussed above, the VH and VL of the scFv can be in the order of, from N-terminal to C-terminal, VH-VL or VL-VH. Thus, the VH and VL of the 2 anti-NK scFvs can be in the order of, from N-terminal to C-terminal, VH-VL-VH-VL, VH-VL-VL-VH, VL-VH-VH-VL, or VL-VH-VL-VH. These VH/VL arrangements for the 2 scFv can also be applied to the embodiments shown in FIGS. 33-34.

[0229] FIGS. 33A-33B present some other embodiments of the Tribody construct of FIG. 32, further having a regulatory domain N-terminal to the Fab comprising a CAP domain, a HSA sequence, and a protease cleavable linker on the same polypeptide. FIG. 33A shows the anti-TAA scFv is located C-terminal to the CL of the anti-CD3 Fab, whereas the 2 anti-NK scFvs are located C-terminal to the CH of the anti-CD3 Fab. FIG. 33B shows the anti-TAA scFv is located C-terminal to the CH of the anti-CD3 Fab, whereas the 2 anti-NK scFvs are located C-terminal to the CL of the anti-CD3 Fab. The regulatory domain N-terminal to the Fab can be linked to the VH or VL of the Fab.

[0230] FIG. 34A presents another embodiment of the Tribody construct of FIG. 33A, wherein the regulatory domain does not contain a protease cleavable linker. FIG. 34B presents another embodiment of the Tribody construct of FIG. 33B, wherein the regulatory domain does not contain a protease cleavable linker. The regulatory domain N-terminal to the Fab can be linked to the VH or VL of the Fab.

[0231] FIG. 35 presents one embodiment of a precursor Tribody construct having antibody binding domains and regulatory domains as described herein, the Fab portion recognizes a CD3 surface antigen, one scFv recognizes a tumor associated antigen (TAA), and one binding domain comprising a cytokine receptor engager (e.g. IL-15). As discussed above, the VH and VL of the scFv can be arranged in the order of VH-VL or VL-VH.

[0232] FIG. 36 presents another embodiment of the Tribody construct of FIG. 35, further having a regulatory domain N-terminal to the Fab comprising a CAP domain, a HSA sequence, and a protease cleavable linker on the same polypeptide. As discussed above, the regulatory domain in this embodiment can be N-terminal to the VH or VL region of the Fab.

[0233] FIG. 37 presents another embodiment of the Tribody construct of FIG. 36. The components shown in the figure are the same as those in FIG. 36, except the regulatory domain N-terminal to the Fab does not comprise a protease cleavable linker.

### Examples of Full Length Sequences for Precursor Tri-specific Antibody Constructs

[0234] As discussed herein, the present disclosure provides precursor Tribody construct polypeptides comprising various components. In one embodiment, the precursor Tribody construct comprises two polypeptides: polypeptide A and polypeptide B, each comprising various binding domains and regulatory components disclosed herein. These binding domains and regulatory components would have various alternative placement, order and arrangement as disclosed herein. For example, the regulatory domain can be linked to polypeptide A or polypeptide B, and the VH and VL of each binding domain can be arranged in the order of VH-VL or VL-VH. Thus, there would be various permutations of arranging the binding domains and regulatory components on polypeptide A and polypeptide B. In view of the disclosure provided herein, one of ordinary skill in the art would readily combine these various components into the precursor tri-specific antibody construct polypeptides described herein. The present disclosure encompasses all the possible permutations of these binding domains and regulatory components on polypeptide A and polypeptide B.

[0235] In some other embodiments, the present disclosure encompasses tri-specific antibodies (Tribodies) derived from the ProTribody constructs disclosed herein, each Tribody comprises two polypeptides: polypeptide A and polypeptide B, each comprising various binding domains but without regulatory components disclosed herein. The binding domains would have various alternative placement, order and arrangement as disclosed herein.

[0236] In one embodiment of the present Tribody construct, the Fab portion recognizes the CD3 surface antigen, one scFv recognizes the tumor associated antigen EGFR, and one scFv recognizes the NK cell surface antigen NKG2A (see FIG. 2F). Examples of amino acid sequences for polypeptide A and polypeptide B of this Tribody construct include, but are not limited to, SEQ ID NOs:180 and 32, or SEQ ID NOs:180 and 141 (IM1064 or IM1065).

[0237] In one embodiment of the present Tribody construct, the Fab portion recognizes the CD3 surface antigen, one scFv recognizes the tumor associated antigen EGFR, and one scFv recognizes the NK cell surface antigen NKG2D (see FIG. 2F). Examples of amino acid sequences for polypeptide A and polypeptide B of this Tribody construct include, but are not limited to, SEQ ID NOs:178 and 32, or SEQ ID NOs:178 and 141 (IM1066 or IM1067).

[0238] In one embodiment of the present Tribody construct, the Fab portion recognizes the CD3 surface antigen, one scFv recognizes the tumor associated antigen 5T4, and one scFv recognizes the NK cell surface antigen NKG2A (see FIG. 2F). Examples of amino acid sequences for polypeptide A and polypeptide B of this Tribody construct include, but are not limited to, SEQ ID NOs:180 and 177, SEQ ID NOs:181 and 177, SEQ ID NOs:184 and 177, SEQ ID NOs:185 and 177, SEQ ID NOs:180 and 354, SEQ ID NOs:180 and 355, SEQ ID NOs:180 and 356, SEQ ID NOs:180 and 357, SEQ ID NOs:186 and 358, SEQ ID NOs:188 and 359, SEQ ID NOs:180 and 363, SEQ ID NOs:180 and 368, SEQ ID NOs:180 and 369, SEQ ID NOs:180 and 370, SEQ ID NOs:180 and 371, SEQ ID NOs:180 and 372, SEQ ID NOs:180 and 373, SEQ ID NOs:180 and 374, SEQ ID NOs:180 and 375, SEQ ID NOs:180 and 376, SEQ ID NOs:180 and 377, SEQ ID NOs:180 and 378, SEQ ID NOs:180 and 379, SEQ ID NOs:180 and 380, SEQ ID NOs:180 and 381, SEQ ID NOs:180 and 382, SEQ ID NOs:180 and 383, SEQ ID NOs:180 and 384, SEQ ID NOs:180 and 385, SEQ ID NOs:180 and 386, SEQ ID NOs:180 and 387, SEQ ID NOs:180 and 388, SEQ ID NOs:180 and 389, SEQ ID NOs:180 and 390, SEQ ID NOs:180 and 391, SEQ ID NOs:180 and 392, SEQ ID NOs:180 and 393, SEQ ID NOs:180 and 394, SEQ ID NOs:180 and 395, SEQ ID NOs:180 and 396, SEQ ID NOs:180 and 397, or SEQ ID NOs:219 and 358 (any one of IM1062, IM1063, IM1093, IM1094, IM1127. IM1128, IM1129, IM1130, IM1153, IM1155, IM1198, IM1199, IM1200, IM1201, IM1202, IM1203, IM1204, IM1205, IM1206, IM1207, IM1208, IM1209, IM1210, IM1211, IM1212, IM1213, IM1214, IM1215, IM1216, IM1217, IM1218, IM1219, IM1220, IM1221, IM1222, IM1223, IM1224, IM1225, IM1226, IM1227, IM1230, IM1236).

[0239] In one embodiment of the present Tribody construct, the Fab portion recognizes the CD3 surface antigen, one scFv recognizes the tumor associated antigen 5T4, and one scFv recognizes the NK cell surface antigen NKG2D (see FIG. 2F). Examples of amino acid sequences for polypeptide A and polypeptide B of this Tribody construct include, but are not limited to, SEQ ID NOs:178 and 177, SEQ ID NOs: 179 and 177, SEQ ID NOs:182 and 177, SEQ ID NOs:183 and 177, SEQ ID NOs:178 and 344, SEQ ID NOs:178 and 345, SEQ ID NOs:178 and 346, SEQ ID NOs:178 and 347, SEQ ID NOs:178 and 348, SEQ ID NOs:178 and 349, SEQ ID NOs:178 and 350, SEQ ID NOs:178 and 351, SEQ ID NOs:178 and 352, SEQ ID NOs:178 and 353, SEQ ID NOs:178 and 354, SEQ ID NOs:178 and 355, SEQ ID NOs:178 and 356, SEQ ID NOs:178 and 357, SEQ ID NOs:187 and 358, SEQ ID NOs:189 and 359, SEQ ID NOs:178 and 360, SEQ ID NOs:178 and 361, SEQ ID NOs:178 and 362, SEQ ID NOs:178 and 363, SEQ ID NOs:178 and 364, SEQ ID NOs:178 and 365, SEQ ID NOs:178 and 366, SEQ ID NOs:178 and 367, SEQ ID NOs:218 and 358, SEQ ID NOs:223 and 392, SEQ ID NOs:224 and 392, SEQ ID NOs:225 and 392, SEQ ID NOs:226 and 392, SEQ ID NOs:227 and 392, SEQ ID NOs:228 and 392, SEQ ID NOs:229 and 392, or SEQ ID NOs:230 and 392 (any one of IM1060, IM1061, IM1091, IM1092, IM1100, IM1101, IM1102, IM1103, IM1104, IM1105, IM1106, IM1107, IM1108, IM1109, IM1132, IM1133, IM1134, IM1135, IM1154, IM1156, IM1175, IM1176, IM1177, IM1178, IM1179, IM1180, IM1181, IM1182, IM1229, IM1244, IM1245, IM1246, IM1247, IM1248, IM1249, IM1250, IM1251).

[0240] In one embodiment of the present Tribody construct, the Fab portion recognizes the CD3 surface antigen, one scFv recognizes the tumor associated antigen 5T4, and one scFv recognizes the NK cell surface antigen CD16 (see FIG. 2F). Examples of amino acid sequences for polypeptide A and polypeptide B of this Tribody construct include, but are not limited to, SEQ ID NOs:252 and 177, or SEQ ID NOs:254 and 358 (IM1280 or IM1282).

[0241] In one embodiment of the present precursor Tribody construct, the Fab portion recognizes the CD3 surface antigen, one scFv recognizes the tumor associated antigen 5T4, and one scFv recognizes the NK cell surface antigen NKG2A. The anti-CD3 Fab further comprise a regulatory domain comprising a CAP domain, a HSA sequence, and a protease cleavable linker (see FIG. 28). Examples of amino acid sequences for polypeptide A and polypeptide B of this Tribody construct include, but are not limited to, SEQ ID NOs:206 and 177, SEQ ID NOs:207 and 177, SEQ ID NOs:208 and 177, SEQ ID NOs:209 and 177, SEQ ID NOs:210 and 177, SEQ ID NOs:211 and 177, SEQ ID NOs:212 and 177, SEQ ID NOs:213 and 177, SEQ ID NOs:206 and 363, SEQ ID NOs:210 and 363, SEQ ID NOs:206 and 398, SEQ ID NOs:210 and 398, SEQ ID NOs:256 and 392, SEQ ID NOs:257 and 392, SEQ ID NOs:258 and 392, SEQ ID NOs:259 and 392, or SEQ ID NOs:260 and 392 (any one of IM1184, IM1185, IM1186, IM1187, IM1188, IM1189, IM1190, IM1191, IM1232, IM1233, IM1237, IM1238, IM1240, IM1241, IM1284, IM1285, IM1286, IM1287, IM1288).

[0242] In some embodiments, a precursor tri-specific antibody construct comprises polypeptide A and polypeptide B, wherein polypeptide A and polypeptide B comprise amino acid sequences have the sequences of SEQ ID NOs: 206 and 398, respectively.

[0243] In one embodiment of the present precursor Tribody construct, the Fab portion recognizes the CD3 surface antigen, one scFv recognizes the tumor associated antigen 5T4, and one scFv recognizes the NK cell surface antigen CD16. The anti-CD3 Fab further comprises a regulatory domain comprising a CAP domain, a HSA sequence, and a protease cleavable linker (see FIG. 28). Examples of amino acid sequences for polypeptide A and polypeptide B of this Tribody construct include, but are not limited to, SEQ ID NOs:253 and 177 (IM1281).

[0244] In one embodiment of the present precursor Tribody construct, the Fab portion recognizes the CD3 surface antigen, one scFv recognizes the tumor associated antigen 5T4, and one scFv recognizes the NK cell surface antigen NKG2A. The anti-CD3 Fab further comprise a regulatory domain comprising a CAP domain, a HSA sequence, but without a protease cleavable linker (see FIG. 29). Examples of amino acid sequences for polypeptide A and polypeptide B of this Tribody construct include, but are not limited to, SEQ ID NOs:214 and 177, SEQ ID NOs:215 and 177, SEQ ID NOs:216 and 177, SEQ ID NOs:217 and 177, SEQ ID NOs:222 and 177, SEQ ID NOs:214 and 363, or SEQ ID NOs:214 and 398 (any one of IM1193, IM1194, IM1195, IM1196, IM1234, IM1239, IM1242).

[0245] In one embodiment of the present precursor Tribody construct, the Fab portion recognizes the CD3 surface antigen, one scFv recognizes the tumor associated antigen 5T4, and one scFv recognizes the NK cell surface antigen CD16. The anti-CD3 Fab further comprises a regulatory domain comprising a CAP domain, a HSA sequence, but without a protease cleavable linker (see FIG. 29). Examples of amino acid sequences for polypeptide A and polypeptide B of this Tribody construct include, but are not limited to, SEQ ID NOs:255 and 177 (IM1283).

[0246] In one embodiment of the present precursor Tribody construct, the Fab portion recognizes the CD3 surface antigen, one scFv recognizes the tumor associated antigen 5T4, and one scFv recognizes the NK cell surface antigen NKG2A. The anti-NK scFv further comprises a regulatory domain comprising a CAP domain and a protease cleavable linker (see FIG. 30). Examples of amino acid sequences for polypeptide A and polypeptide B of this Tribody construct include, but are not limited to, SEQ ID NOs: 198 and 177, SEQ ID NOs: 199 and 177, SEQ ID NOs:200 and 177, SEQ ID NOs:201 and 177, SEQ ID NOs:202 and 177, SEQ ID NOs:203 and 177, SEQ ID NOs:204 and 177, SEQ ID NOs:205 and 177, SEQ ID NOs: 231 and 392, SEQ ID NOs: 232 and 392, SEQ ID NOs: 233 and 392, SEQ ID NOs: 234 and 392, or SEQ ID NOs: 235 and 392 (any one of IM1166, IM1167, IM1168, IM1169, IM1170, IM1171, IM1172, IM1173, IM1253, IM1254, IM1255, IM1256, IM1257).

[0247] In one embodiment of the present precursor Tribody construct, the Fab portion recognizes the CD3 surface antigen, one scFv recognizes the tumor associated antigen 5T4, and one scFv recognizes the NK cell surface antigen NKG2D. The anti-NK scFv further comprises a regulatory domain comprising a CAP domain and a protease cleavable linker (see FIG. 30). Examples of amino acid sequences for polypeptide A and polypeptide B of this Tribody construct include, but are not limited to, SEQ ID NOs: 190 and 177, SEQ ID NOs: 191 and 177, SEQ ID NOs:192 and 177, SEQ ID NOs:193 and 177, SEQ ID NOs:194 and 177, SEQ ID NOs:195 and 177, SEQ ID NOs:196 and 177, SEQ ID NOs:197 and 177 (any one of IM1158, IM1159, IM1160, IM1161, IM1162, IM1163, IM1164, IM1165).

[0248] In one embodiment of the present precursor Tribody construct, the Fab portion recognizes the CD3 surface antigen, one scFv recognizes the tumor associated antigen 5T4, and one scFv recognizes the NK cell surface antigen NKG2A. The anti-NK scFv further comprises a regulatory domain comprising a CAP domain and a protease cleavable linker, and the anti-CD3 Fab further comprises a regulatory domain comprising a CAP domain, a HSA sequence, and a protease cleavable linker (see FIG. 3C). As discussed herein, the VH and VL domain of the scFv can be arranged, from the N-terminal to the C-terminal, in the order of VH-VL or VL-VH. Examples of amino acid sequences for polypeptide A and polypeptide B of this Tribody construct include, but are not limited to, SEQ ID NOs:236 and 392, SEQ ID NOs:237 and 392, SEQ ID NOs:238 and 392, SEQ ID NOs:239 and 392, or SEQ ID NOs:240 and 392 (any one of IM1258, IM1259, IM1260, IM1261, IM1262).

[0249] In one embodiment of the present precursor Tribody construct, the Fab portion recognizes the CD3 surface antigen, one scFv recognizes the tumor associated antigen 5T4, and one scFv recognizes the NK cell surface antigen NKG2A. The anti-NK scFv further comprises a regulatory domain comprising a CAP domain without a protease cleavable linker, and the anti-CD3 Fab further comprises a regulatory domain comprising a CAP domain, a HSA sequence, without a protease cleavable linker (see FIG. 31). Examples of amino acid sequences for polypeptide A and polypeptide B of this Tribody construct include, but are not limited to, SEQ ID NOs:241 and 392, SEQ ID NOs:242 and 392, SEQ ID NOs:243 and 392, SEQ ID NOs:244 and 392, or SEQ ID NOs:245 and 392 (any one of IM1263, IM1264, IM1265, IM1266, IM1267).

[0250] In one embodiment of the present Tribody construct, the Fab portion recognizes the CD3 surface antigen, one scFv recognizes the tumor associated antigen 5T4, and one binding region comprising two scFv that recognize the NK cell surface antigen NKG2A (see FIG. 32). Examples of amino acid sequences for polypeptide A and polypeptide B of this Tribody construct include, but are not limited to, SEQ ID NOs:246 and 177, or SEQ ID NOs:247 and 358 (IM1272 or IM1273). In some embodiments, a precursor tri-specific antibody construct upon cleavage of cleavable peptides yields a tri-specific antibody derived from the precursor tri-specific antibody construct comprising a polypeptide A and a polypeptide B, wherein said polypeptide A and polypeptide B comprise amino acid sequences having the sequences of SEQ ID NOs: 246 and 177 (IM1272). A tri-specific antibody derived from a precursor tri-specific antibody construct disclosed herein comprises polypeptide A and polypeptide B, said polypeptide A and polypeptide B comprising amino acid sequences having the sequences of SEQ ID NOs: 246 and 177, respectively (IM1272).

[0251] In one embodiment of the present precursor Tribody construct, the Fab portion recognizes the CD3 surface antigen, one scFv recognizes the tumor associated antigen 5T4, and one binding region comprising two scFv that recognize the NK cell surface antigen NKG2A, and further having a regulatory domain N-terminal to the Fab comprising a CAP domain, a HSA sequence, and a protease cleavable linker on the same polypeptide. In one embodiment, the anti-5T4 scFv is located C-terminal to the CL of the anti-CD3 Fab, whereas the 2 anti-NKG2A scFvs are located C-terminal to the CH of the anti-CD3 Fab (see FIG. 33A). Examples of amino acid sequences for polypeptide A and polypeptide B of this Tribody construct include, but are not limited to, SEQ ID NOs:248 and 177, or SEQ ID NOs:248 and 392 (IM1274 or IM1276).

[0252] In one embodiment of the present precursor Tribody construct, the Fab portion recognizes the CD3 surface antigen, one scFv recognizes the tumor associated antigen 5T4, and one binding region comprising two scFv that recognize the NK cell surface antigen NKG2A, and further having a regulatory domain N-terminal to the Fab comprising a CAP domain, a HSA sequence, and a protease cleavable linker on the same polypeptide. In one embodiment, the anti-5T4 scFv is located C-terminal to the CH of the anti-CD3 Fab, whereas the 2 anti-NKG2A scFvs are located C-terminal to the CL of the anti-CD3 Fab (see FIG. 33B). Examples of amino acid sequences for polypeptide A and polypeptide B of this Tribody construct include, but are not limited to, SEQ ID NOs:250 and 399 (IM1278).

[0253] In one embodiment of the present precursor Tribody construct, the Fab portion recognizes the CD3 surface antigen, one scFv recognizes the tumor associated antigen 5T4, and one binding region comprising two scFv that recognize the NK cell surface antigen NKG2A, and further having a regulatory domain N-terminal to the Fab comprising a CAP domain, a HSA sequence, without a protease cleavable linker. In one embodiment, the anti-5T4 scFv is located C-terminal to the CL of the anti-CD3 Fab, whereas the 2 anti-NKG2A scFvs are located C-terminal to the CH of the anti-CD3 Fab (see FIG. 34A). Examples of amino acid sequences for polypeptide A and polypeptide B of this Tribody construct include, but are not limited to, SEQ ID NOs:249 and 177, or SEQ ID NOs:249 and 392 (IM1275 or IM1277).

[0254] In one embodiment of the present precursor Tribody construct, the Fab portion recognizes the CD3 surface antigen, one scFv recognizes the tumor associated antigen 5T4, and one binding region comprising two scFv that recognize the NK cell surface antigen NKG2A, and further having a regulatory domain N-terminal to the Fab comprising a CAP domain, a HSA sequence, without a protease cleavable linker. In one embodiment, the anti-5T4 scFv is located C-terminal to the CH of the anti-CD3 Fab, whereas the 2 anti-NKG2A scFvs are located C-terminal to the CL of the anti-CD3 Fab (see FIG. 34B). Examples of amino acid sequences for polypeptide A and polypeptide B of this Tribody construct include, but are not limited to, SEQ ID NOs:251 and 399 (IM1279).

[0255] In some embodiments, the first and second binding domains each comprise a single chain variable fragment (scFv). A skilled artisan would appreciate that a scFv is not actually a fragment of an antibody, but instead is a fusion polypeptide comprising the heavy chain variable (VH) and light chain variable (VL) regions of an immunoglobulin, connected by a short linker peptide of ten to about 25 amino acids.

[0256] In some embodiments, the third binding domain comprises a Fab fragment, wherein the first binding domain is attached to the C-terminal end of the light chain constant region (CL) of the Fab and the second domain is attached at the C-terminal end of the heavy chain constant region (CH) of the Fab. Alternatively, the third binding domain comprises a Fab fragment, wherein the first binding domain is attached to the C-terminal end of the heavy chain constant region (CH) of the Fab and the second domain is attached at the C-terminal end of the light chain constant region (CL) of the Fab.

[0257] In some embodiments, the third binding domain comprises a Fab fragment, wherein a first regulatory domain, for example a CAP masking domain, is attached to the N-terminal end of the VL chain of the Fab and a second regulatory domain, for example an HSA HLP domain, is attached at the N-terminal end of the VH chain of the Fab. In some embodiments, the third binding domain comprises a Fab fragment, wherein a first regulatory domain, for example a CAP masking domain, is attached to the N-terminal end of the VH chain and a second regulatory domain, for example an HSA HLP domain, is attached at the N-terminal end of the VL chain.

[0258] In some embodiments, between the scFv of the first binding domain and the CL of the third binding domain there may be a linker sequence. In some embodiments, between the scFv of the first binding domain and the CH of the third binding domain there may be a linker sequence. In some embodiments, between the scFv of the second binding domain and the CL of the third binding domain there may be a linker sequence. In some embodiments, between the scFv of the second binding domain and the CH of the third binding domain there may be a linker sequence. In some embodiments, between the scFv of the first and second binding domains, and the CL and CH of the third binding domains, respectively, there may be linker sequences.

[0259] In some embodiments, between the first sub-regulatory domain and the VH chain of the third binding domain, there may be a linker sequence which is cleavable. In some embodiments, between the first sub-regulatory domain and the VL chain of the third binding domain, there may be a linker sequence which is cleavable. In some embodiments, between the second sub-regulatory domain and the VH chain of the third binding domain, there may be a linker sequence which is cleavable. In some embodiments, between the second sub-regulatory domain and the VL chain of the third binding domain, there may be a linker sequence which is cleavable. In some embodiments, between the first and second sub-regulatory domains, and the VH and VL chains of the third binding domains, respectively, there may be linker sequences which are cleavable.

[0260] These general formats are the basic structure that can be built upon to construct the precursor tri-specific (tribody) antibody constructs described herein (FIGS. 2-5).

[0261] In some embodiments, the regulatory domain comprises two sub-domains: a first sub-regulatory domain comprising a protease cleavable linker component and a serum half-life prolonging (HLP) domain (e.g. human serum albumin polypeptide sequence component), and the second sub-regulatory domain comprising protease cleavable linker and a CAP amino acid (masking) component (see e.g. FIG. 2A). In some embodiments, in addition to the first and second sub-regulatory domains, there is a third regulatory domain comprising a third protease cleavage domain and a CAP component that reduces the ability of the second binding domain to bind to its target antigen (see e.g. FIG. 3A). In some embodiments, there is only a single regulatory domain comprising a protease cleavage domain, a half-life prolonging (HLP) domain, and a CAP component that reduces the ability of a binding domain to bind to its target antigen (see FIG. 2E). The skilled artisan would appreciate that the presence of linkers, for example anyone of the linkers displayed in the constructs shown in FIGS. 2-5 provide flexibility to a polypeptide while not necessarily providing essential regulatory feature to the regulatory domain, such as is provided by a CAP (a masking activity) or by an HSA component (increased half-life).

[0262] In some embodiments, the third binding domain having a binding specificity to an immune effector molecule, for example but not limited to a CD3 epsilon chain (CD3ε) extracellular epitope, binds specifically to the CAP amino acid component. In some embodiments, the CAP component effectively blocks binding of the precursor tri-specific antibody construct to the immune effector target molecule, for example an antigen on T-cell or NK cell. In some embodiments, activation of cytotoxicity to a target is specifically masked by the CAP component. In some embodiments, wherein the regulatory domain comprises a cleavable CAP component, activation of cytotoxicity is limited to a tumor milieu (see FIG. 1).

[0263] In some embodiments, the CAP component comprises an amino acid sequence present within the human CD3 epsilon polypeptide chain. In some embodiments, the CAP component comprises an amino acid sequence present as part of the extracellular portion of the human CD3 epsilon chain. In some embodiments, the CAP component comprises an amino acid sequence selected from the amino acid sequence of the N-terminal end of human CD3 epsilon precursor polypeptide. In some embodiments, the CAP component comprises an amino acid sequence selected from the amino acid sequence of the N-terminal end of human CD3 epsilon mature polypeptide. In some embodiments, the CAP component comprises an amino acid sequence present as part of the extracellular portion of a NK cell surface antigen.

[0264] In one embodiment, the amino acid sequence of the precursor human CD3 epsilon is set for in SEQ ID NO: 1. Human CD3 epsilon is expressed in a precursor form, wherein amino acids 1-21 form the signal peptide. The amino acid sequence of the mature human CD3 epsilon is set forth in amino acids 22-207 of SEQ ID NO: 1, as set forth herein in SEQ ID NO: 2. In some embodiments, the extracellular epitope of human CD3 epsilon is located within the precursor sequence, as set forth in SEQ ID NO: 3. In some embodiments, the extracellular epitope of a mature human CD3 epsilon is located within amino acids 1-27 of the precursor sequence, and is set forth in SEQ ID NO: 4. In some embodiments, the extracellular epitope of human CD3 epsilon is located within amino acids QDGNEEMGGITQTPYKVSISGTTVILT (SEQ ID NO: 5; AA1-27).

[0265] In some embodiments, the amino acid sequence of a CAP component is set forth in SEQ ID NO: 5, or a homolog thereof. In some embodiments, the amino acid sequence of a CAP component is a selected contiguous sequence within SEQ ID NO: 4, or a homolog thereof.

[0266] In some embodiments, homologues of SEQ ID NO: 5 or of a CAP sequence selected from SEQ ID NO: 4, comprise polypeptides which are at least 50%, at least 55%, at least 60%, at least 65%, at least 70%, at least 75%, at least 80%, at least 85%, at least 87%, at least 89%, at least 91%, at least 93%, at least 95%, at least 96%, at least 97%, at least 98%, or at least 99% homologous to the amino acid sequence.

[0267] In some embodiments, homologues comprise polypeptides which are at least 50%, at least 55%, at least 60%, at least 65%, at least 70%, at least 75%, at least 80%, at least 85%, at least 87%, at least 89%, at least 91%, at least 93%, at least 95%, at least 96%, at least 97%, at least 98%, or at least 99% homologous to a human CD3 epsilon polypeptide or a portion thereof, as determined using BlastP software of the National Center of Biotechnology Information (NCBI) using default parameters.

[0268] A skilled artisan would appreciate that the term “homology”, and grammatical forms thereof, encompasses the degree of similarity between two or more structures. The term “homologous sequences” refers to regions in macromolecules that have a similar order of monomers. When used in relation to nucleic acid sequences, the term “homology” refers to the degree of similarity between two or more nucleic acid sequences (e.g., genes) or fragments thereof. Typically, the degree of similarity between two or more nucleic acid sequences refers to the degree of similarity of the composition, order, or arrangement of two or more nucleotide bases (or other genotypic feature) of the two or more nucleic acid sequences. The term “homologous nucleic acids” generally refers to nucleic acids comprising nucleotide sequences having a degree of similarity in nucleotide base composition, arrangement, or order. The two or more nucleic acids may be of the same or different species or group. The term “percent homology” when used in relation to nucleic acid sequences, refers generally to a percent degree of similarity between the nucleotide sequences of two or more nucleic acids.

[0269] When used in relation to polypeptide (or protein) sequences, the term “homology” refers to the degree of similarity between two or more polypeptide (or protein) sequences (e.g., genes) or fragments thereof. Typically, the degree of similarity between two or more polypeptide (or protein) sequences refers to the degree of similarity of the composition, order, or arrangement of two or more amino acid of the two or more polypeptides (or proteins). The two or more polypeptides (or proteins) may be of the same or different species or group. The term “percent homology” when used in relation to polypeptide (or protein) sequences, refers generally to a percent degree of similarity between the amino acid sequences of two or more polypeptide (or protein) sequences. The term “homologous polypeptides” or “homologous proteins” generally refers to polypeptides or proteins, respectively, that have amino acid sequences and functions that are similar. Such homologous polypeptides or proteins may be related by having amino acid sequences and functions that are similar but are derived or evolved from different or the same species using the techniques described herein.

[0270] In some embodiments, homologues comprise polypeptides which are at least 50%, at least 55%, at least 60%, at least 65%, at least 70%, at least 75%, at least 80%, at least 85%, at least 87%, at least 89%, at least 91%, at least 93%, at least 95%, at least 96%, at least 97%, at least 98%, or at least 99% homologous to a polypeptide or a portion thereof disclosed herein, as determined using BlastP software of the National Center of Biotechnology Information (NCBI) using default parameters. In some embodiments, homologues comprise a nucleotide sequences which is at least 50%, at least 55%, at least 60%, at least 65%, at least 70%, at least 75%, at least 80%, at least 85%, at least 87%, at least 89%, at least 91%, at least 93%, at least 95%, at least 96%, at least 97%, at least 98%, or at least 99% homologous to a nucleotide sequence or a portion thereof disclosed herein, as determined using BlastN software of the National Center of Biotechnology Information (NCBI) using default parameters.

[0271] In some embodiments, homology also encompasses deletion, insertion, or substitution variants, including an amino acid substitution, thereof and biologically active polypeptide fragments thereof. In one embodiment, the variant comprises conservative substitutions, or deletions, insertions, or substitutions that do not significantly alter the three-dimensional structure of the polypeptide component of interest described herein. In some embodiments, the deletion, insertion, or substitution does not alter the function of interest of the polypeptide component of interest disclosed herein.

[0272] In some embodiments, homology also encompasses deletion, insertion, or substitution variants, including an amino acid substitution thereof and biologically active polypeptide fragments thereof. In one embodiment, the variant comprises conservative substitutions, or deletions, insertions, or substitutions that do not significantly alter the three-dimensional structure of the CAP component, e.g., the portion of a human CD3 epsilon polypeptide present in the CAP component, particularly in the areas of the epitope recognized and bound by the third binding domain. In some embodiments, the deletion, insertion, or substitution does not alter the function of interest of the CAP component, which in some embodiment, is binding to the third binding domain, or reducing T-cell binding, or reducing T-cell activation, or any combination thereof.

[0273] In some embodiments, the CAP component comprises an amino acid sequence comprising a portion of a polypeptide binding domain binding to an NK antigen, particularly in the areas of the epitope recognized and bound by the NK binding domain. Thus, in some embodiments, a CAP component reduces the ability of the second and/or third binding domain to bind the extracellular epitope of an NK antigen.

[0274] In some embodiments, a CAP component is 6-110 amino acids long. In some embodiments, a CAP component is between about 6-10 amino acids long. In some embodiments, a CAP component is between about 10-20 amino acids long. In some embodiments, a CAP component is between about 20-30 amino acids long. In some embodiments, a CAP component is between about 20-40 amino acids long. In some embodiments, a CAP component is between about 30-40 amino acids long. In some embodiments, a CAP component is between about 40-60 amino acids long. In some embodiments, a CAP component is between about 60-80 amino acids long. In some embodiments, a CAP component is between about 80-100 amino acids long. In some embodiments, a CAP component is between about 80-110 amino acids long.

[0275] In some embodiments, a CAP component is 6 amino acids long. In some embodiments, a CAP component is 7 amino acids long. In some embodiments, a CAP component is 8 amino acids long. In some embodiments, a CAP component is 9 amino acids long. In some embodiments, a CAP component is 10 amino acids long. In some embodiments, a CAP component is 11 amino acids long. In some embodiments, a CAP component is 12 amino acids long. In some embodiments, a CAP component is 13 amino acids long. In some embodiments, a CAP component is 14 amino acids long.

[0276] In some embodiments, a CAP component is 15 amino acids long. In some embodiments, a CAP component is 16 amino acids long. In some embodiments, a CAP component is 17 amino acids long. In some embodiments, a CAP component is 18 amino acids long. In some embodiments, a CAP component is 19 amino acids long. In some embodiments, a CAP component is 20 amino acids long. In some embodiments, a CAP component is 21 amino acids long. In some embodiments, a CAP component is 22 amino acids long. In some embodiments, a CAP component is 23 amino acids long. In some embodiments, a CAP component is 24 amino acids long. In some embodiments, a CAP component is 25 amino acids long. In some embodiments, a CAP component is 26 amino acids long. In some embodiments, a CAP component is 27 amino acids long. In some embodiments, a CAP component is 28 amino acids long. In some embodiments, a CAP component is 29 amino acids long. In some embodiments, a CAP component is 30 amino acids long. In some embodiments, a CAP component is 31, 32, 33, 34, 35, 36, 37, 38, 39, or 40 amino acids long.

[0277] In some embodiments, the CAP component specifically binds to the third binding region, thereby reducing T-cell binding of the precursor construct. In some embodiments, the CAP component specifically binds to the third binding region, thereby inhibiting NK cell binding of the precursor construct. In some embodiments, the CAP component specifically binds to the third binding region, thereby reducing T-cell activation by the precursor construct. In some embodiments, the CAP component specifically binds to the third binding region, thereby inhibiting NK cell activation by the precursor construct.

[0278] In some embodiments, the CAP component specifically binds to the second binding region, thereby reducing NK cell binding of the precursor construct. In some embodiments, the CAP component specifically binds to the third binding region, thereby inhibiting NK cell binding of the precursor construct. In some embodiments, the CAP component specifically binds to the second binding region, thereby reducing NK cell activation of the precursor construct. In some embodiments, the CAP component specifically binds to the third binding region, thereby inhibiting NK cell activation by the precursor construct.

[0279] Examples of CAP components that inhibit binding to CD3 include, but are not limited to, polypeptides having the sequences of SEQ ID NO: 695, 696, or 697, or homologous sequences thereof as explained and determined above. Examples of CAP components that inhibit binding to NKG2A include, but are not limited to, polypeptides having the sequences of SEQ ID NO: 698, 699, 700, 701, 702, 703, or 704, or homologous sequences thereof as explained and determined above. Examples of CAP components that inhibit binding to NKG2D include, but are not limited to, polypeptides having the sequences of SEQ ID NO:705, 706, 707, or 708, or homologous sequences thereof as explained and determined above.

[0280] In some embodiments, a regulatory domain comprises a cleavable half-life prolonging domain. In some embodiments, a cleavable half-life prolonging domain comprises an HSA polypeptide.

[0281] In some embodiments, there is a linker between the components of the regulatory domains. In some embodiments, there is a linker between a regulatory domain and the N-terminus of the VH chain of the Fab fragment. In some embodiments, there is a linker between a regulatory domain and the N-terminus of the VL chain of the Fab fragment. In some embodiments, there is a linker between a regulatory domain and the N-terminus of the VH chain of the Fab fragment and a linker between a regulatory domain and the N-terminus of the VL chain of the Fab fragment. In some embodiments, a linker between components of the regulatory domain and the N-terminus of an Fab fragment polypeptide is a cleavable linker. In some embodiments, any of the linkers between components of the regulatory domain and the Fab polypeptide is a cleavable linker. In some embodiments, a linker between components of the regulatory domain and the Fab polypeptide is not cleavable.

[0282] In some embodiments, a regulatory domain comprises a cleavable serum half-life prolonging domain comprising a protease cleavable domain and a human serum albumin polypeptide (HSA). In some embodiments, the order of components in the regulatory domain is (N-terminal to C-terminal) HSA-L-protease cleavable domain, wherein L is a possible linker amino acid sequence (see e.g. FIG. 2A). In some embodiments, wherein the protease cleavable domain is C-terminal to an HSA polypeptide sequence, the precursor construct has a regulatable enhanced half-life wherein the precursor construct has an enhanced half-life in circulation in vivo and in the absence of a tumor microenvironment.

[0283] In some embodiments, a regulatory domain comprises a cleavable half-life prolonging domain comprising a protease cleavable domain and a CAP masking domain. In some embodiments, the order of components in the regulatory domain is (N-terminal to C-terminal) CAP-L-protease cleavable domain, wherein L is a possible linker amino acid sequence (see FIG. 2E). Prior to entry of the precursor antibody into a tumor microenvironment, the tri-specific precursor construct is effectively blocked from binding with an immune effector target molecule

[0284] In some embodiments, there are two sub-regulatory domains: one comprising a cleavable serum half-life prolonging domain and one comprising a cleavable CAP masking domain. In some embodiments, there are three regulatory domains: one comprising a cleavable half-life prolonging domain and two comprising a cleavable CAP masking domain. A precursor tri-specific construct with HSA regulatory domain and at least one CAP regulatory domain, has a regulatable enhances half-life wherein the precursor tri-specific antibody construct has an enhanced half-life and is effectively blocked from binding with at least one immune effector target molecule. Half-life may be enhanced in circulation in vivo and in the absence of a tumor milieu. In some embodiments, activation of cytotoxicity by a precursor tri-specific antibody construct is limited to the tumor milieu. In some embodiments, the precursor construct maintains an enhanced half-life in circulation in vivo and is effectively blocked from binding with an immune effector target molecule in circulation in vivo within a non-tumor milieu (FIG. 1). In some embodiments, activation of cytotoxicity to target is specifically masked by a CAP component of the precursor construct in circulation and in the absence of a tumor milieu, and the precursor construct comprises an enhance half-life in circulation in vivo and in the absence or presence of a tumor milieu. In some embodiments, activation of cytotoxicity is limited to the tumor milieu.

[0285] In some embodiments, activation of cytotoxicity to target is specifically masked by the CAP component in circulation and in a non-tumor milieu. In some embodiments, activation of cytotoxicity is limited to the tumor milieu. In some embodiments, activation of a T-cell is specifically masked by a CAP component. In some embodiments, activation of an NK cell is specifically masked by a CAP component. In some embodiments, activation of both a T-cell and an NK cell is specifically masked by a CAP component.

[0286] In some embodiments, the amino acid sequence of the HSA component is set forth in SEQ ID NO: 6. In some embodiments, the amino acid sequence of the HSA component is set forth in SEQ ID NO: 7.

[0287] In some embodiments, the amino acid sequence of the HSA components is any HSA polypeptide sequence known in the art or a portion thereof, or a homolog thereof. In some embodiments, the HSA component of a precursor tri-specific antibody construct comprises, for example but not limited to, any human albumin protein sequence disclosed in a known database such as the protein data base of National Center of Biotechnology Information (NCBI) or Swiss-Prot, wherein the sequence might be identified specifically as human or may be identified as a synthetic construct.

[0288] In some embodiments, the HSA component is encoded by the nucleotide sequence set forth in SEQ ID NO: 8.

[0289] In some embodiments, the nucleic acid sequence of the HSA components is any HSA nucleotide sequence known in the art or a portion thereof, or a homolog thereof. In some embodiments, the HSA component of a precursor tri-specific antibody construct comprises a nucleic acid sequence that encodes, for example but not limited to, any human albumin protein sequence disclosed in a known database such as the protein data base the is part of National Center of Biotechnology Information (NCBI) or Swiss-Prot, wherein the sequence might be identified specifically as human or may be identified as a synthetic construct.

[0290] In some embodiments, homologues of an HSA component comprise polypeptides which are at least 50%, at least 55%, at least 60%, at least 65%, at least 70%, at least 75%, at least 80%, at least 85%, at least 87%, at least 89%, at least 91%, at least 93%, at least 95%, at least 96%, at least 97%, at least 98%, or at least 99% homologous to the amino acid sequence. In some embodiments, homologues comprise polypeptides which are at least 50%, at least 55%, at least 60%, at least 65%, at least 70%, at least 75%, at least 80%, at least 85%, at least 87%, at least 89%, at least 91%, at least 93%, at least 95%, at least 96%, at least 97%, at least 98%, or at least 99% homologous to an HSA polypeptide or a portion thereof, as determined using BlastP software of the National Center of Biotechnology Information (NCBI) using default parameters. In some embodiments, homologues encoding an HSA component comprise nucleotides which are at least 50%, at least 55%, at least 60%, at least 65%, at least 70%, at least 75%, at least 80%, at least 85%, at least 87%, at least 89%, at least 91%, at least 93%, at least 95%, at least 96%, at least 97%, at least 98%, or at least 99% homologous to the nucleic acid sequence. In some embodiments, homologues encode polypeptides which are at least 50%, at least 55%, at least 60%, at least 65%, at least 70%, at least 75%, at least 80%, at least 85%, at least 87%, at least 89%, at least 91%, at least 93%, at least 95%, at least 96%, at least 97%, at least 98%, or at least 99% homologous to an HSA polypeptide or a portion thereof, as determined using BlastP software of the National Center of Biotechnology Information (NCBI) using default parameters.

[0291] In some embodiments, homology also encompasses deletion, insertion, or substitution variants, including an amino acid substitution, thereof and biologically active polypeptide fragments thereof. In one embodiment, the variant comprises conservative substitutions, or deletions, insertions, or substitutions that do not significantly alter the three-dimensional structure of the HSA component. In some embodiments, the deletion, insertion, or substitution does not alter the function of interest of the HSA component, which in some embodiment, is providing half-life prolonging domain.

[0292] Linear representation of embodiments of regulatory domains of a precursor tri-specific antibody construct disclosed herein include but are not limited to (N-terminal to C-terminal)
[0293] (1) CAP-L-protease cleavable domain-L, wherein the L may or may not be present;
[0294] (2) HSA-L-protease cleavable domain-L, wherein the L may or may not be present;
[0295] (3) CAP-L-non-cleavable domain-L, wherein the L may or may not be present;
[0296] (4) HSA-L-non-cleavable domain-L, wherein the L may or may not be present;
[0297] (5) Protease cleavable domain-L-CAP;
[0298] (6) Protease cleavable domain-L-HSA;
[0299] (7) Non-cleavable domain-L-CAP; and
[0300] (8) Non-cleavable domain-L-HSA.

[0301] In some embodiments, a precursor tri-specific antibody construct disclosed herein comprises a precursor construct having an increased therapeutic window, wherein its restricted presence provides the ability to target a wide array of new targets or provide improved activities or a combination thereof, for example but not limited to, the ability to activate T-cells and/or NK cells in the cancer microenvironment and targeting cancer-specific TAAs depending on a cancer type and the specific TAAs that are uniquely expressed by this cancer type in conjunction with the proteases produced by this cancer type. In some embodiments, the precursor construct has the ability to activate T-cells only in the TME and targets a cancer specific TAA and a NK cell. In some embodiments, the precursor construct has the ability to activate T-cells only in the TME and targets a TAA present in the TME and a NK cell.

[0302] As used herein, the “C-terminal” of a polypeptide and the like, e.g., carboxyl-terminus, carboxy-terminus, C-terminal tail, C-terminal end, or COOH-terminus) is the end of an amino acid chain (protein or polypeptide), terminated by a free carboxyl group (-COOH). When the protein is translated from messenger RNA, it is created from N-terminus to C-terminus. The convention for writing peptide sequences is to put the C-terminal end on the right and write the sequence from N- to C-terminus. In some embodiments, the C-terminal end of a polypeptide encompasses to the last amino acid residue of the polypeptide which donates its amine group to form a peptide bond with the carboxyl group of its adjacent amino acid residue.

[0303] As used herein, the “N-terminal” of a polypeptide and the like, e.g., amino-terminus, NH₂-terminus, N-terminal end or amine-terminus) is the start of a protein or polypeptide referring to the free amine group (-NH₂) located at the end of a polypeptide. Normally the amine group is bonded to another carboxylic group in a protein to make it a chain, but since the end of a protein has only 1 out of 2 areas chained, the free amine group is referred to the N-terminus. As stated above, by convention, peptide sequences are written N-terminus to C-terminus, left to right in LTR languages. This correlates the translation direction to the text direction (because when a protein is translated from messenger RNA, it is created from N-terminus to C-terminus - amino acids are added to the carbonyl end). In some embodiments, the N-terminal end of a polypeptide encompasses the first amino acid of the polypeptide which donates its carboxyl group to form a peptide bond with the amine group of its adjacent amino acid residue.

[0304] A skilled artisan would appreciate that a linker component may encompass an amino acid peptide linking through one or more chemical bonds or indirect linking through one or more linkers. Any suitable chemical bonds can be used to make a direct link, including without limitation, covalent bonds such as peptide bond and disulfide bond, non-covalent bonds such as hydrogen bond, hydrophobic bond, ionic bond, and Van der Waals bond.

[0305] A “covalent bond” refers herein to a stable association between two atoms which share one or more electrons. Examples of the covalent bonds include, without limitation, a peptide bond and a disulfide bond. “Peptide bond” as used herein refers to the covalent bond formed between the carboxyl group of an amino acid and the amine group of the adjacent amino acid. “Disulfide bond” as used herein refers to a covalent bond formed between two sulfur atoms. A disulfide bond can be formed from oxidation of two thiol groups. In certain embodiments, the covalently link is direct link through a covalent bond. In certain embodiments, the covalently link is direct link through a peptide bond or a disulfide bond.

[0306] A “non-covalent bond” refers herein to an attractive interaction between two molecules or two chemical groups that does not involve sharing of electrons. Examples of non-covalent bonds include, without limitation, a hydrogen bond, a hydrophobic bond, an ionic bond, and a Van der Waals bond. A “hydrogen bond” refers herein to attractive force between a hydrogen atom of a first molecule/group and an electronegative atom of a second molecule/group. A “hydrophobic bond” refers herein to a force that causes hydrophobic or nonpolar molecules/groups to aggregate or associate together in an aqueous environment. An “ionic bond” refers herein to an attraction between a positive ion and a negative ion. A “Van der Waals bond” refers herein to a non-specific attraction force between two adjacent molecules/groups which have momentary random fluctuations in the distribution of electrons. In certain embodiments, the covalently link is direct link through a non-covalent bond. In certain embodiments, the covalently link is direct link through a hydrogen bond, a hydrophobic bond, an ionic bond, or a Van der Waals bond.

[0307] A skilled artisan would appreciate that a protease cleavable domain described herein encompasses linker comprising a protease cleavage site. Thus, the terms “protease cleavable domain” and protease cleavable linker” may be used interchangeably herein having all the same meanings and qualities.

[0308] A skilled artisan would appreciate that the terms “tumor microenvironment”, “cancer microenvironment”, “TME”, and “tumor milieu” may be used interchangeably having the same qualities and meanings and encompassing the microenvironment to tumor development. While the normal cellular microenvironment can inhibit malignant cell growth, the modifications that occur in the tumor microenvironment may synergistically support cell proliferation.

[0309] Tumors shape their microenvironment and support the development of both tumor cells and non-malignant cells. The tumor microenvironment affects angiogenesis by interfering with the signaling pathways required for cell recruitment and vascular construction. Endothelial progenitor cells (EPCs) that are recruited under hypoxic conditions for angiogenesis have been associated as well with metastasis. In some embodiments, TAA comprise cell surface antigens associated with angiogenesis. In some embodiments, a TAA is overexpressed by a cancer cell. In some embodiments, a TAA is expressed on an embryonic cell. In some embodiments, a TAA is expressed on an embryonic cell and on a cancer cell but has no or only minimal expression on normal adult cells. In some embodiments, a TAA is expressed on a solid tumor cell. In some embodiments, a TAA is expression on a non-solid cancerous cell. In some embodiments, a TAA is expressed on an angiogenic tissue cell.

[0310] In addition. proteins secreted by the tumor modify the microenvironment by contributing growth factors and proteases that degrade the extracellular matrix and affect cell motility and adhesion. Stromal cells secrete ECM proteins, cytokines, growth factors, proteases, protease inhibitors, and endoglycosidases such as heparanase. Matrix metalloproteinases (MMP) are important secreted proteins closely associated with cancer development. MMP are expressed at higher levels by tumor-associated epithelial cells than by normal epithelial cells. In some embodiments, the microenvironment of a tumor comprises increased protease activity compared with a non-tumor environment.

[0311] In some embodiments, a protease cleavable domain comprises a protease cleavable amino acid sequence (cleavable peptide/cleavable linker; CP) comprises a peptide cleavable by a serine protease, a cysteine protease, an aspartate protease, or a matrix metalloprotease (MMP) cleavable sequence. In some embodiments, a protease cleavable domain comprises a protease cleavable amino acid sequence (cleavable peptide/cleavable linker; CP) comprises a peptide, which is a substrate for cleavage by multiple difference proteases. In some embodiments, a protease cleavable domain comprises a protease cleavable amino acid sequence (cleavable peptide/cleavable linker; CP) comprises a peptide, which is a substrate for cleavage by a MMP2/MMP9 protease, or a urokinase-type plasminogen activator (uPA) protease, or a matriptase, or a legumain protease. In some embodiments, the serine protease, cysteine protease, aspartate protease, uPA protease, matriptase, legumain protease, or matrix metalloprotease (MMP) is expressed at higher levels in a tumor microenvironment. In some embodiments, the matrix metalloprotease is expressed at higher levels in a tumor microenvironment.

[0312] In some embodiments, the protease cleavable sequence is an MMP cleavable sequence. In some embodiments, the matrix metalloprotease cleavable sequence may be a matrix metalloprotease 1 (MMP-1), a matrix metalloprotease 2 (MMP-2), a matrix metalloprotease 9 (MMP-9), or a matrix metalloprotease 14 (MMP-14) cleavable sequence.

[0313] In some embodiments, the protease cleavable sequence is a uPA (urokinase-type plasminogen activator) cleavable sequence. In some embodiments, the protease cleavable sequence is a MT-SP1 (matripase) cleavable sequence.

[0314] In some embodiments, the protease cleavable sequence is an MMP, uPA, matriptase, and legumain cleavable sequence.

[0315] In some embodiments, the protease cleavable domain comprises an amino acid sequence 1 to 10 amino acids long. In some embodiments, the protease cleavable domain is 1 to 20 amino acids long.

[0316] In some embodiments, a protease cleavable domain comprises a protease substrate cleavage sequence, for example but not limited to, an MMP substrate cleavage sequence. A well-known peptide sequence of PLGLAG (SEQ ID NO: 9) in a substrate can be cleaved by most MMPs. Substrate sequences that can be cleaved by MMPs have been extensively studied. A protease substrate cleavage sequence refers to a peptide sequence that can be cleaved by protease treatment. An MMP substrate sequence refers to a peptide sequence that can be cleaved by incubation with an MMP. SEQ ID NO: 9 is a commonly used MMP substrate cleavage sequence (see e.g., Jiang, PNAS (2004) 101:17867-72; Olson, PNAS (2010) 107:4311-6). In another embodiment, the protease cleavage site is recognized by MMP-2, MMP-9, or a combination thereof. In yet another embodiment, the protease site comprises the sequence set forth as GPLGMLSQ (SEQ ID NO: 10), GPLGLWAQ (SEQ ID NO: 11), GPLGLAG (SEQ ID NO: 12), KKNPAELIGPVD (SEQ ID NO: 13), KKQPAANLVAPED (SEQ ID NO: 14), GPLGIAGQ (SEQ ID NO: 15), or PVGLIG (SEQ ID NO: 16). In some embodiments, the protease cleavage site comprises any protease cleavage site (protease cleavable peptide; CP) known in the art to be susceptible to proteases present in a tumor environment, for example by not limited to the protease cleavage sites disclosed in Eckhard, U, et al., (2016) Matrix Biol. Jan;49:37-60.

[0317] In some embodiments, a protease cleavable sequence comprising a uPA cleavable sequence comprises the sequence set forth as NSGRAV (SEQ ID NO: 17), SGRSA (SEQ ID NO: 18), LGGSGRSANAILE (SEQ ID NO: 19), SGRS (SEQ ID NO: 20), GGSGRSANK (SEQ ID NO: 21), LGGSGRSANAILEC (SEQ ID NO: 22), GGGRR (SEQ ID NO: 23), TGRGPS (SEQ ID NO: 24), LSGRSDNH (SEQ ID NO: 25), or PLTGRSGG (SEQ ID NO: 26).

[0318] In some embodiments, a protease cleavable sequence comprising a matripase cleavable sequence comprises the sequence set forth as QRRVVGG (SEQ ID NO: 27), QAR, AANL (SEQ ID NO: 29), PTNL (SEQ ID NO: 30), PTN, or SAN. In some embodiments, a protease cleavable sequence comprises the sequences of SEQ ID NO:709, 710, 711, 712, 713, 714, or 715. As discussed herein, any combination of protease cleavable sequences can be found in a Tribody or ProTribody construct; for example, the protease cleavable sequences could be cleaved by the same or different proteases, or the protease cleavable sequences could all have the same or different sequences.

[0319] In some embodiments, a cleavable peptide is encoded by the nucleic acid sequence set forth in SEQ ID NO: 33: CCACTGGGCCTGGCCGGC.

[0320] In some embodiments, the amino acid sequence of a protease cleavable sequence that serves as a substrate for MMP2/9, uPA, matriptase, and legumain cleavable sequence is set forth as PLGLAGSGRSDNH (SEQ ID NO: 35). In some embodiments, all of the protease cleavable sequences comprised in a precursor construct comprise SEQ ID NO: 35. In some embodiments, at least one of the protease cleavable sequences comprised in a precursor construct comprise SEQ ID NO: 35. In some embodiments, at least 2 of the protease cleavable sequences comprised in a precursor construct comprise SEQ ID NO: 35. In some embodiments, at least 3 of the protease cleavable sequences comprised in a precursor construct comprise SEQ ID NO: 35.

[0321] In some embodiments, the sequence of the protease cleavable peptide component of regulatory domain one is the same as the protease cleavable peptide component of regulatory domain two. In some embodiments, the sequence of the protease cleavable peptide component of regulatory domain one is not the same as the protease cleavable peptide component of regulatory domain two. In some embodiments, the protease cleaving the cleavable peptide component of regulatory domain one is the same protease as is cleaving the protease cleavable peptide component of regulatory domain two. In some embodiments, the protease cleaving the cleavable peptide component of regulatory domain one is not the same protease as is cleaving the protease cleavable peptide component of regulatory domain two.

[0322] In some embodiments, the protease cleaving the first and second regulatory domains is an MMP protease. In some embodiments, the protease cleaving the first and second regulatory domains is a uPA protease. In some embodiments, the protease cleaving the first and second regulatory domains is a matripase protease. In some embodiments, one of the first or second regulatory domains is cleaved by an MMP protease, while the other regulatory domain is cleaved by a non-MMP protease. In some embodiments, one of the first or second regulatory domains is cleaved by an MMP protease, while the other regulatory domain is cleaved by a uPA protease. In some embodiments, one of the first or second regulatory domains is cleaved by an MMP protease, while the other regulatory domain is cleaved by a matripase protease. In some embodiments, one of the first or second regulatory domains is cleaved by one MMP protease, while the other regulatory domain is cleaved by another MMP protease.

[0323] A stable linker or a protease non-cleavable linker refers to a linker peptide sequence that does not belong to the known protease substrate sequences and thus does not lead to significant cleavage product formation upon incubation with a protease.

[0324] In some embodiments, the cleavage substrate (or cleavage sequence) of the linker may include an amino acid sequence that can serve as a substrate for a protease, usually an extracellular protease. In other embodiments, the cleavage sequence comprises a cysteine-cysteine pair capable of forming a disulfide bond, which can be cleaved by action of a reducing agent. In other embodiments the cleavage sequence comprises a substrate capable of being cleaved upon photolysis.

[0325] The cleavage substrate is positioned within the protease cleavable domain such that when the cleavage substrate is cleaved by a cleaving agent (e.g., a cleavage substrate of a linker is cleaved by the protease and/or the cysteine-cysteine disulfide bond is disrupted via reduction by exposure to a reducing agent) or by light-induced photolysis, in the presence of a target, resulting in cleavage products having various functional properties as described herein. In some embodiments, cleavage products have decreased half-life. In some embodiments, cleavage product has the ability to activate T-cell (FIG. 1).

[0326] The cleavage substrate of a cleavage domain may be selected based on a protease that is co-localized in the diseased tissue, or on the surface of the cell that expresses the target antigen of interest of a binding domain of a fusion moiety. A variety of different conditions are known in which a target of interest is co-localized with a protease, where the substrate of the protease is known in the art. In the example of cancer, the target tissue can be a cancerous tissue, particularly cancerous tissue of a solid tumor. There are reports in the literature of increased levels of proteases having known substrates in a number of cancers, e.g., solid tumors. See, e.g., [La Rocca et al, (2004) British J. of Cancer 90(7): 1414-1421. Radisky ES, Front Biosci (Landmark Ed). 2015 Jun 1;20:1144-63; Miao C, et al., Oncotarget. 2017 May 9;8(19):32309-32321]. Non-limiting examples of disease include: all types of cancers (breast, lung, colorectal, prostate, head and neck, pancreatic, etc), rheumatoid arthritis, Crohn’s disease, melanomas, SLE, cardiovascular damage, ischemia, etc. Furthermore, anti-angiogenic targets, such as VEGF, are known.

[0327] In some embodiments, where the TAA of the first or second binding domain is selected such that it is capable of binding a tumor antigen, a suitable cleavage substrate sequence for the linker will be one which comprises a peptide substrate that is cleavable by a protease that is present at the cancerous treatment site, that is the tumor microenvironment that is particularly present at elevated levels at the cancer treatment site as compared to non-cancerous tissues.

[0328] In some embodiments, the first or second, or both the first and second binding domain of a precursor construct disclosed herein can bind a TAA, e.g., EGFR and the cleavage substrate sequence can be a matrix metalloprotease (MMP) substrate, and thus is cleavable by an MMP. In other embodiments, a TAA comprises ROR1 and the cleavage substrate sequence can be a matripase (MT-SP1, TADG-15, epithin, ST14) substrate, and thus is cleavable by a matriptase. In other embodiments, the first or second, or both the first and second binding domain of a precursor construct can bind a target of interest and the cleavage substrate present in the cleavable domain can be, for example, legumain, plasmin, TMPRSS-¾, MMP-9, MT1-MMP, cathepsin, caspase, human neutrophil elastase, beta-secretase, uPA, or PSA. In other embodiments, the cleavage domain is cleaved by other disease-specific proteases, in diseases other than cancer such as multiple sclerosis or rheumatoid arthritis.

[0329] In some embodiments, a precursor tri-specific antibody construct may bind to a TAA by way of the first binding domain, wherein the cleavable domain of the regulatory arm remains uncleaved and therefore the third binding domain of a precursor construct or a partially cleaved precursor construct may be specifically unavailable to a T cell or NK cell target antigen due to the presence of the CAP component. In some embodiments, a precursor tri-specific antibody construct may bind to a TAA by way of the first binding domain, wherein the cleavable domain of the regulatory arm remains uncleaved, wherein the precursor construct or partially cleaved precursor construct has enhanced half-life due to a half-life prolonging domain (e.g., an HSA polypeptide sequence) and the third binding domain is available or partially available to a T cell or NK cell target antigen. In some embodiments, a precursor tri-specific antibody construct may bind to a TAA by way of the first binding domain, wherein the cleavable domain of both regulatory arms remain uncleaved, wherein the precursor construct has enhanced half-life due to a half-life prolonging domain (e.g., an HSA polypeptide sequence) and the third binding domain remains specifically unavailable to a T cell or NK cell target antigen due to the presence of the CAP component.

[0330] In some embodiments, there are linkers (L) between any of the component parts of the precursor tri-specific antibody construct. In some embodiments, the linkers of the precursor construct (e.g., the linkers between the VL and VH of the Fab and the regulatory domains) comprise cleavable domain linkers. In some embodiments, the ability to be cleaved is independently selected for each linker. In some embodiments, the ability to be cleaved by a protease is independently selected for each linker. In some embodiments, a linker is cleavable by a protease. In some embodiments, a linker is not cleavable by a protease. In some embodiments, the linker between the CH or CL of the Fab and the scFv of the first binding domain comprises a non-cleavable linker. In some embodiments, the linker between the CH or CL of the Fab and the scFv of the second binding domain comprises a non-cleavable linker.

[0331] A skilled artisan would appreciate that in some embodiments, a linker comprises a spacer between two active components or between two regions of an active component.

[0332] A skilled artisan would appreciate that the cleavable domain comprises a linear amino acid sequence comprising an enzyme cleavage site and may, in certain embodiments, be termed a “cleavable linker” or a “linker” or a “cleavable peptide” or a “CP”, wherein linkers disclosed herein may be cleavable or non-cleavable.

[0333] In some embodiments, a linker is present C-terminal to the Heavy chain constant region (CH) of the Fab fragment. In some embodiments, a linker is present C-terminal to the Light chain constant region (CL) of the Fab fragment. In some embodiments, the linker C-terminal to the CH is cleavable. In some embodiments, the linker C-terminal to the CH is non-cleavable. In some embodiments, the linker C-terminal to the CL is cleavable. In some embodiments, the linker C-terminal to the CL is non-cleavable.

[0334] In some embodiments, a linker is a single amino acid. In some embodiments, a cleavable linker comprises the amino acid sequence set forth in any of SEQ ID NOs: 9-17, or 29-30 or amino acid sequences QAR, PTN, or SAN. In some embodiments, a cleavable linker is encoded by the nucleic acid sequence set forth in SEQ ID NO: 33. In some embodiments, a cleavable linker is encoded by the nucleic acid sequence set forth in SEQ ID NO: 35.

[0335] In some embodiments, a non-cleavable linker comprises the amino acid sequence set forth in SEQ ID NOs: 162. In some embodiments, a non-cleavable linker is encoded by the nucleic acid sequence set forth in SEQ ID NO: 163.

[0336] For specific cleavage by an enzyme protease, contact between the enzyme and the cleavage substrate is made. When the precursor construct comprising a first and a second binding domain binding to a TAA or an extracellular NK antigen, or any combination thereof as described herein in detail, a third binding domain binding to an extracellular epitope of a T cell or NK cell surface antigen, and two regulatory domains comprising cleavable linkers is in the presence of sufficient enzyme activity, the cleavable domains can be cleaved. Sufficient enzyme activity can refer to the ability of the enzyme to make contact with a protease cleavable domain having the cleavage site and effect cleavage. In some embodiments, an enzyme may be in the vicinity of the precursor construct but unable to cleave because of other cellular factors or protein modification of the enzyme. In some embodiments, an anti-TAA comprises an anti-NK antigen.

[0337] In some embodiments, cleavable domain substrates can include but are not limited to substrates cleavable by one or more of the following enzymes or proteases: ADAM10; Caspase 8, Cathepsin S, MMP 8, ADAM12, Caspase 9, FAP, MMP 9, ADAM17, Caspase 10, Granzyme B, MMP 13, ADAMTS, Caspase 11, Guanidinobenzotase (GB), MMP 14, ADAMTS5. Caspase 12, Hepsin, MT-SP1, BACE, Caspase 13, Human Neutrophil Elastase Neprilysin (HNE), Caspases, Caspase 14, Legumain, NS¾A, Caspase 1, Cathepsins, Matriptase 2, Plasmin, Caspase 2, Cathepsin A, Meprin, PSA, Caspase 3, Cathepsin B, MMP 1, PSMA, Caspase 4, Cathepsin D, MMP 2, TACE, Caspase 5, Cathepsin E, MMP 3, TMPRSS ¾, Caspase 6, Cathepsin K, MMP 7, uPA, Caspase 7, Matripase (MT-SP1, TADG-15, epithin, ST14) and MT1-MMP.

[0338] In another embodiment, the cleavage substrate can involve a disulfide bond of a cysteine pair, which is thus cleavable by a reducing agent such as, for example, but not limited to a cellular reducing agent such as glutathione (GSH), thioredoxins, NADPH, flavins, ascorbate, and the like, which can be present in large amounts in tissue of or surrounding a solid tumor.

[0339] Other appropriate protease cleavage sites for use in the cleavable linkers herein are known in the art or may be identified using methods such as those described by Turk et al., 2001 Nature Biotechnology 19, 661-667.

[0340] In some embodiments, both the first binding domain, the second binding domain, and the third binding domain of the precursor tri-specific antibody constructs can bind to their respective human and non-chimpanzee primate target molecules. The first binding domain, thus, binds to a human cell surface tumor associated antigen (TAA) and to the corresponding homolog of the cell surface TAA in a non-chimpanzee primate. The identification and determination of homologs of human cell surface TAA in non-chimpanzee primates is well known to the person skilled in the art and can be carried out e.g. by sequence alignments. The third binding domain can bind to a T cell or NK cell surface antigen, e.g. an human CD3ε extracellular epitope, and can bind to the corresponding homolog of the CD3ε in a non-chimpanzee primate. In some embodiments, the first or second or third binding domains, or any combination thereof, also bind to their respective chimpanzee target molecules.

[0341] A skilled artisan would appreciate that in some embodiments, a cell surface tumor associated antigen (TAA) encompasses a molecule which is displayed on the surface of a cell. In some embodiments, the cell is a tumor cell. In some embodiments, the cell is a non-tumor cell present in the milieu of a tumor, for example but not limited to a cell present within vasculature tissue associated with a tumor or cancer. In some embodiments, the cell is a non-tumor cell present in the milieu of a tumor, for example but not limited to an NK cell.

[0342] A skilled artisan would appreciate that the terms “antigen” or “immunogen” encompass a peptide, protein, polypeptide which is immunogenic. In some embodiments, an antigen is capable of eliciting an immune response in a mammal, and therefore contains at least one and may contain multiple epitopes. An “antigen” molecule or a portion of a molecule is capable of being bound by a selective binding agent, such as an antigen-binding portion of a Fab fragment or an antigen-binding portion of an scFv fragment. Additionally, an “antigen” is capable of being used in an animal to produce antibodies capable of binding to an epitope of that antigen. In some embodiments, a CAP component comprises the portion of an antigen to which the second binding domain binds.

[0343] The term “epitope” includes any determinant, in certain embodiments, a polypeptide determinant, capable of specific binding to a TAA or an immunoglobulin or T-cell receptor, or an NK surface antigen. An epitope is a region of an antigen that is bound by an antibody or an antigen-binding fragment thereof. In some embodiments, a CAP component comprises the epitope to which the third binding domain binds.

[0344] In certain embodiments, epitope determinants include chemically active surface groupings of molecules such as amino acids, sugar side chains, phosphoryl or sulfonyl, and may in certain embodiments have specific three-dimensional structural characteristics, and/or specific charge characteristics. In certain embodiments, a precursor tri-specific antibody construct is said to specifically bind an antigen when it preferentially recognizes its target antigen in a complex mixture of proteins and/or macromolecules. A precursor tri-specific antibody construct is said to specifically bind an antigen when the equilibrium dissociation constant is ≤ 10-5, 10-6 or 10-7 M. In some embodiments, the equilibrium dissociation constant may be ≤ 10-8 M or 10-9 M. In some further embodiments, the equilibrium dissociation constant may be ≤ 10-10 M or 10-11 M. Antigens disclosed herein included but are not limited to TAA, CAP components, NK antigens, and immuno-effector molecules such as a human CD3 epsilon polypeptide.

[0345] In some embodiments, the tumor associated antigen (TAA) is a tumor antigen. In some embodiments, tumor antigens comprise those antigens are presented on tumor cells. In some embodiments, the tumor antigen is present on a cell of solid tumor. In some embodiments, the tumor antigen is a cancer antigen, present on a cell of a non-solid tumor.

[0346] Precursor Tri-specific antibodies can be designed to bind at least one tumor associated antigen (TAA), which in some embodiments comprises a tumor cell surface antigen, a T-cell antigen, and either an NK cell antigen or a second antigen (e.g. a cytokine), with the goal of the antibody being to bind and kill tumor cells more selectively over normal cells, and ultimately to increase the efficacy and safety over a monospecific reagent, wherein a tri-specific antibody comprises a binding domain binding at least one cell surface tumor associated antigen (TAA), a binding domain binding a cell surface NK cell antigen or second TAA, and a binding domain binding an extracellular epitope of a T-cell. However, such tri-specific antibodies fail to regulate the order of binding and therefore, may bind a T-cell prior to or in the absence of binding a TAA, wherein cytotoxicity provided by the activated T-cell may actually cause harmful side effects by non-specifically causing non-tumor cell death. In some embodiments, a TAA comprises a human antigen.

[0347] In some embodiments, a second or a third binding site binds to an antigen comprising an NK extracellular surface antigen. In some embodiments, an NK surface antigen comprises an extracellular portion of CD56 or an extracellular portion of CD16. In some embodiments, an NK surface antigen comprises an extracellular portion of a CD16 (FcγRIII), a CD16A (FcγRIIIa), a CD56, a sMICA/B, an ILT, a SLAMF7, a NKp44, a NKp30, a DNAM-1, a NKG2D, a NKG2C/CD94, or a NKp46 antigen. In some embodiments, the NK cell antigen comprises a NK cell activating receptor, a NK cell inhibitory receptor, or a NK cell co-stimulatory receptor. Examples of NK cell activating receptors, NK cell inhibitory receptors, and NK cell co-stimulatory receptors have been discussed above.

[0348] In some embodiments, a first binding domain binds to a polypeptide target which in some embodiments is associated with a particular cancer or cancers or disease condition, for example but not limited to a TAA comprising FcγRI, FcγRIIa FcγRIIb FcγRIIIa FcγRIIIb, CD28, CD137, CTLA-4, FAS, fibroblast growth factor receptor 1 (FGFR1), FGFR2, FGFR3, FGFR4, glucocorticoid-induced TNFR-related (GITR) protein, lymphotoxin-beta receptor (LTβR), toll-like receptors (TLR), tumor necrosis factor-related apoptosis-inducing ligand-receptor 1 (TRAIL receptor 1; multiple malignancies including ovarian and colorectal carcinomas) and TRAIL receptor 2, prostate-specific membrane antigen (PSMA; prostate carcinoma) protein, prostate stem cell antigen (PSCA) protein (prostate adenocarcinoma), CA125 (multiple cancers including ovarian carcinoma), tumor-associated protein carbonic anhydrase IX (CAIX; multiple cancers including renal cell carcinoma), epidermal growth factor receptor 1 (EGFR1; epithelial malignancies), EGFR (non-small cell lung cancer, epithelial ovarian cancer, colorectal cancer, head & neck cancer, breast cancer, lung cancer, esophageal cancer), EGFRvIII, human epidermal growth factor receptor 2 (Her2/neu; Erb2; epithelial malignancies), ErbB3 also known as HER3 (epithelial malignancies), Folate receptor, ephrin receptors, PDGFRa (epithelial malignancies), ErbB-2, CD20 (B cells, autoimmune, allergic or malignant), CD22 (B cells, autoimmune or malignant), CD30 (B cell malignancies), CD33 (myeloid malignancies), CD40, CD37, CD38, CD70 (B cells, autoimmune, allergic or malignant), CD74 (B cells, autoimmune, allergic or malignant), CD56 (T cell or NK cell lymphomas), CD40 (B cells, autoimmune, allergic or malignant); CD80 (B cells, autoimmune, allergic or malignant), CD86 (B cells, autoimmune, allergic or malignant), CD2 (T cell or NK cell lymphomas), p53, cMet also known as tyrosine-protein kinase Met or hepatocyte growth factor receptor (HGFR; Gastrointestinal tract and hepatic malignancies), MAGE-A1, MAGE-A2, MAGE-A3, MAGE-A4, MAGE-A6, MAGE-A10, MAGE-A12, BAGE, DAM-6, -10, GAGE-1, -2, -8, GAGE-3, -4, -5, -6, -7B, NA88-A, NY-ESO-1, BRCA1, BRCA2, MART-1, MC1R, Gp100, PSA, PSM, Tyrosinase, Wilms’ tumor antigen (WT1), TRP-1, TRP-2, ART-4, CAMEL, Cyp-B, hTERT, hTRT, iCE, MUC1 (epithelial malignancies), MUC2, P-cadherin (Epithelial malignancies, including breast adenocarcinoma), Myostatin (GDF8) (many tumors including sarcoma and ovarian and pancreatic adenocarcinoma), Cripto (TDGF1) (Epithelial malignancies including colon, breast, lung, ovarian, and pancreatic cancers), ACVRL1/ALK1 (multiple malignancies including leukemias and lymphomas), MUC5AC (Epithelial malignancies, including breast adenocarcinoma), PRAME, P15, RU1, RU2, SART-1, SART-3, WT1, AFP, β-catenin/m, Caspase-8/m, CDK-4/m, ELF2M, GnT-V, G250, HSP70-2M, HST-2, KIAA0205, MUM-1, MUM-2, MUM-3, Myosin/m, RAGE, SART-2, TRP-2/INT2, 707-AP, Annexin II, CDC27/m, TPI/mbcr-abl, ETV6/AML, LDLR/FUT, Pml/RARα, TEL/AML1, CD28, CD137 (B cells or T cells, autoimmune, allergic or malignant), CanAg (tumors such as carcinomas of the colon and pancreas), Mesothelin (many tumors including mesothelioma and ovarian and pancreatic adenocarcinoma), DR5 (multiple malignancies including ovarian and colorectal carcinoma), PD-1 (B cells, autoimmune, allergic or malignant), PD1L (Multiple malignancies including epithelial adenocarcinoma), IGF-1R (Most malignancies including epithelial adenocarcinoma), CXCR4 (B cells or T cells, autoimmune, allergic or malignant), Neuropilin 1 (Epithelial malignancies, including lung cancer), Glypicans (multiple cancers including liver, brain and breast cancers), EphA2 (multiple cancers including neuroblastoma, melanoma, breast cancer, and small cell lung carcinoma), CD138 (Myeloma), B7-H3 (CSC, stroma, NSCLC, Bladder tumors, mesothelioma, melanoma), gpA33 (colorectal cancers), GPC3 (liver, lung, esophageal, gastric, head and neck cancers), SSTR2 (Neuroendocrine tumors, GIST), ROR1 (Hematological, pancreatic, ovarian, renal cell carcinoma, NSCLC, and triple negative breast cancer), 5T4 (mesothelioma, gastic, ovarin, renal cancer, cancer stem cells in NSCLC, head and neck cancer), or a VEGF-R2 (vasculature associated with the majority of malignancies including epithelial adenocarcinomas). Examples of the unwanted target cells or cancer cells associated with the TAA presented are included in italics in parenthesis.

[0349] In some embodiments, a TAA is selected from the group consisting of EGFR, ROR1, PSMA, and 5T4. In some embodiments, a first binding domain comprises an scFv that binds to a human EGFR (anti-hEGFR), or a human ROR1 (anti-ROR1), or a human PSMA (anti-PSMA), or a human 5T4 (anti-5T4).

[0350] In some embodiments, the TAA is EGFR. In some embodiments, a first binding domain comprises a scFv that binds to human EGFR (anti-hEGFR). In some embodiments, the amino acid sequence of an anti-hEGFR-scFv light chain variable region (VL) is set forth in SEQ ID NO: 34. In some embodiments, an anti-hEGFR scFv VL sequence comprises a homolog of SEQ ID NO: 34.

[0351] In some embodiments, the anti-hEGFR-scFv light chain variable region (VL) is encoded by the nucleic acid sequence set forth in SEQ ID NO: 36. In some embodiments, the anti-hEGFR-scFv light chain variable region (VL) is encoded by a homolog of the nucleic acid sequence set forth in SEQ ID NO: 36.

[0352] In some embodiments, the amino acid sequence of an anti-hEGFR-scFv heavy chain variable region (VH) set forth in SEQ ID NO: 37. In some embodiments, an anti-hEGFR scFv VH sequence comprises a homolog of SEQ ID NO: 37.

[0353] In some embodiments, the anti-hEGFR-scFv heavy chain variable region (VH) is encoded by the nucleic acid sequence set forth in SEQ ID NO: 38. In some embodiments, the anti-hEGFR-scFv heavy chain variable region (VH1) is encoded by a homolog of the nucleic acid sequence set forth in SEQ ID NO: 38.

[0354] In some embodiments, an anti-EGFR scFv comprises a linker between a VL and a VH region. In some embodiments, the linker between a VL and a VH region comprises any linker disclosed herein. In some embodiments, the amino acid sequence of a linker between a VL and VH region of an anti-EGFR scFv is set forth by SEQ ID NO: 39. In some embodiments, the linker between a VL and a VH region of an anti-EGFR scFv comprises a homolog of SEQ ID NO: 39. In some embodiments, a linker between a VL and VH region of an anti-EGFR scFv is encoded by the nucleic acid sequence set forth in SEQ ID NO:40. In some embodiments, a linker between a VL and VH region of an anti-EGFR scFv is encoded by a homolog by the nucleic acid sequence set forth in SEQ ID NO: 40.

[0355] In some embodiments, components of an anti-EGFR scFv comprises a VL-linker-VH order (N-terminal to C-terminal) (FIGS. 8A and 9A). In some embodiments, components of an anti-EGFR scFv comprises a VH-linker-VL order (N-terminal to C-terminal) (FIGS. 8B and 9B).

[0356] In some embodiments, an anti-EGFR scFv sequence including a linker sequence comprises the sequence SEQ ID NO: 41. In some embodiments, an anti-EGFR scFv including a linker sequence comprises a homolog of SEQ ID NO: 41.

[0357] In some embodiments, an anti-EGFR scFv sequence including a linker sequence comprises the sequence SEQ ID NO: 42. In some embodiments, an anti-EGFR scFv including a linker sequence comprises a homolog of SEQ ID NO: 42.

[0358] In some embodiments, the amino acid sequence of an anti-hROR1-scFv, or an anti-PSMA-scFv, or an anti-5T4-scFv light chain variable region are set forth in in Table 1 below:

TABLE 1

Amino acid Sequences of and Optimized Nucleotide Acid sequences encoding anti-hROR1-scFv, or an anti-PSMA-scFv, or an anti-5T4-scFv

| Antigen Binding (anti-antigen) | SEQ ID NO: |
|---|---|
| ROR1 (VL-VH) | 156 |
| ROR1 (VL-VH) | 157 |
| ROR1 (VH-VL) | 166 |
| ROR1 (VH-VL) | 167 |
| PSMA (VL-VH) | 168 |
| PSMA (VL-VH) | 169 |
| PSMA (VH-VL) | 170 |
| PSMA (VH-VL) | 171 |
| 5T4 (VL-VH) | 172 |
| 5T4 (VL-VH) | 173 |
| 5T4 (VH-VL) | 174 |
| 5T4 (VH-VL) | 175 |

[0359] In some embodiments, homologues comprise polypeptides which are at least 50%, at least 55%, at least 60%, at least 65%, at least 70%, at least 75%, at least 80%, at least 85%, at least 87%, at least 89%, at least 91%, at least 93%, at least 95%, at least 96%, at least 97%, at least 98%, or at least 99% homologous to the amino acid sequence of an anti-EGFR scFv. In some embodiments, homologues comprise polypeptides which are at least 50%, at least 55%, at least 60%, at least 65%, at least 70%, at least 75%, at least 80%, at least 85%, at least 87%, at least 89%, at least 91%, at least 93%, at least 95%, at least 96%, at least 97%, at least 98%, or at least 99% identical to an amino acid sequence of an anti-EGFR scFv, or any anti-ROR1 scFv, or an anti-PSMA scFv, or an anti-5T4 scFv.

[0360] In some embodiments, a nucleotide sequence encoding an anti-EGFR scFv including a linker sequence comprises the sequence SEQ ID NO: 43. In some embodiments, an anti-EGFR scFv including a linker sequence comprises a homolog of SEQ ID NO: 43.

[0361] In some embodiments, a nucleotide sequence encoding an anti-EGFR scFv including a linker sequence comprises the sequence SEQ ID NO: 44. In some embodiments, an anti-EGFR scFv including a linker sequence comprises a homolog of SEQ ID NO: 44.

[0362] In some embodiments, homologues comprise nucleotides which are at least 50%, at least 55%, at least 60%, at least 65%, at least 70%, at least 75%, at least 80%, at least 85%, at least 87%, at least 89%, at least 91%, at least 93%, at least 95%, at least 96%, at least 97%, at least 98%, or at least 99% homologous to the nucleic acid sequence of an anti-EGFR scFv, . In some embodiments, homologues comprise nucleotides which are at least 50%, at least 55%, at least 60%, at least 65%, at least 70%, at least 75%, at least 80%, at least 85%, at least 87%, at least 89%, at least 91%, at least 93%, at least 95%, at least 96%, at least 97%, at least 98%, or at least 99% identical to the nucleic acid sequence of an anti-EGFR scFv or any anti-ROR1 scFv, or an anti-PSMA scFv, or an anti-5T4 scFv.

[0363] In some embodiments, disclosed herein are homologues of an anti-hEGFR scFv VL (SEQ ID NO: 34 or SEQ ID NO: 35) or anti-hEGFR scFv VH (SEQ ID NO: 37) or an anti-hEGFR scFv (SEQ ID NO: 41) or an anti-hEGFR scFv (SEQ ID NO: 42), respectively, as determined using BlastP software of the National Center of Biotechnology Information (NCBI) using default parameters. In some embodiments, disclosed herein are homologues of nucleotide sequences encoding an anti-hEGFR scFv VL (SEQ ID NO: 36) or anti-hEGFR scFv VH (SEQ ID NO: 38) or an anti-hEGFR scFv (SEQ ID NO: 43) or an anti-hEGFR scFv (SEQ ID NO: 44), respectively, as determined using BlastP software of the National Center of Biotechnology Information (NCBI) using default parameters.

[0364] In some embodiments, disclosed herein are homologues of an anti-hROR1 scFv VL-VH (SEQ ID NO: 156) or an anti-hROR1 scFv VH-VL (SEQ ID NO: 169), as determined using BlastP software of the National Center of Biotechnology Information (NCBI) using default parameters. In some embodiments, disclosed herein are homologues of nucleotide sequences encoding an anti-hROR1 scFv VL-VH (SEQ ID NO: 157) or an anti-hROR1 scFv VH-VL (SEQ ID NO:167), as determined using BlastP software of the National Center of Biotechnology Information (NCBI) using default parameters.

[0365] In some embodiments, disclosed herein are homologues of an anti-hPSMA scFv VL-VH (SEQ ID NO: 168) or an anti-hPSMA scFv VH-VL (SEQ ID NO: 170), as determined using BlastP software of the National Center of Biotechnology Information (NCBI) using default parameters. In some embodiments, disclosed herein are homologues of nucleotide sequences encoding an anti-hPSMA scFv VL-VH (SEQ ID NO: 169) or an anti-hPSMA scFv VH-VL (SEQ ID NO: 171), as determined using BlastP software of the National Center of Biotechnology Information (NCBI) using default parameters.

[0366] In some embodiments, disclosed herein are homologues of an anti-h5T4 scFv VL-VH (SEQ ID NO: 172) or an anti-h5T4 scFv VH-VL (SEQ ID NO: 174), as determined using BlastP software of the National Center of Biotechnology Information (NCBI) using default parameters. In some embodiments, disclosed herein are homologues of nucleotide sequences encoding an anti-h5T4 scFv VL-VH (SEQ ID NO: 173) or an anti-h5T4 scFv VH-VL (SEQ ID NO: 174), as determined using BlastP software of the National Center of Biotechnology Information (NCBI) using default parameters.

[0367] In some embodiments, homology also encompasses deletion, insertion, or substitution variants, including an amino acid substitution, thereof and biologically active polypeptide fragments thereof. In one embodiment, the variant comprises conservative substitutions, or deletions, insertions, or substitutions that do not significantly alter the three-dimensional structure of the polypeptide of interest, e.g., VL or VH region of the first binding domain, particularly in the areas of the CDR epitope binding regions. In some embodiments, the deletion, insertion, or substitution does not alter the function of interest of the anti-hEGFR VL or anti-hEGFR VH or an anti-EGFR scFv, present in the first, or the second binding domain, or in both the first and the second binding domains of a precursor construct, which in some embodiment, is binding to an EGFR on a target tumor cell. In some embodiments, the deletion, insertion, or substitution does not alter the function of interest of an anti-ROR1 scFv, or an anti-PSMA, or an anti-5T4 scFv present in the first, or the second binding domain, or in both the first and the second binding domains of a precursor construct, which in some embodiment, is binding to an ROR1, PSMA, or 5T4, respectively on a target tumor cell.

[0368] In some embodiments, a first or second binding domain, or both a first and second binding domain binding to a cell surface tumor associated antigen includes the sequence set forth in SEQ ID NO: 34, or a homolog thereof. In some embodiments, a first or second binding domain, or both a first and second binding domain binding to a cell surface tumor associated antigen includes the sequence set forth in SEQ ID NO: 37, or a homolog thereof.

[0369] In some embodiments, a first or second binding domain, or a first and second binding domain binding to a cell surface tumor associated antigen includes the sequence set forth in any of SEQ ID NO: 34, 37, 156, 166, 168, 170, 172, or 174 or a homolog thereof.

[0370] In some embodiments, a first or second binding domain, or a first and second binding domain binding to a cell surface tumor associated antigen includes the sequence set forth in SEQ ID NO: 41 or a homolog thereof. In some embodiments, a first or second binding domain, or a first and second binding domain binding to a cell surface tumor associated antigen includes the sequence set forth in SEQ ID NO: 42 or a homolog thereof.

[0371] In some embodiments, a first or second binding domain, or both a first and second binding domain binding to a cell surface tumor associated antigen and encoded by a nucleotide sequence including the sequences set forth in any of SEQ ID NO: 36, 38, 157, 167, 169, 171, 173, or 175, or a homolog thereof.

[0372] In some embodiments, a first or second binding domain, or a first and second binding domain binding to a cell surface tumor associated antigen is encoded by a nucleotide sequence that includes the sequence set forth in SEQ ID NO: 36 or a homolog thereof, and the sequence set forth in SEQ ID NO: 38 or a homolog thereof.

[0373] In some embodiments, a first or second binding domain, or a first and second binding domain binding to a cell surface tumor associated antigen in encoded by a nucleotide sequence that includes the sequence set forth in SEQ ID NO: 43 or a homolog thereof. In some embodiments, a first or second binding domain, or a first and second binding domain binding to a cell surface tumor associated antigen includes the sequence set forth in SEQ ID NO: 44 or a homolog thereof.

[0374] In some embodiments, the nucleotide sequences encoding a precursor tri-specific antibody construct polypeptide is optimized for mammalian transcription and translation. In some embodiments, the nucleotide sequences encoding a first binding domain or a second binding domain or both a first and a second binding domain of a precursor tri-specific antibody construct polypeptides is optimized for mammalian transcription and translation. In some embodiments, the nucleotide sequence of a VL or VH, or of both a VL and VH regions of a first binding domain or a second binding domain, or a first and a second binding domain are optimized for mammalian transcription and translation.

[0375] In another embodiment, the TAA provided herein is an angiogenic antigen which is expressed on both activated pericytes and pericytes in tumor angiogenic vasculature, which is associated with neovascularization in vivo. Angiogenic antigens are known in the art see for example WO2010/102140, which is incorporated by reference herein. For example, an angiogenic antigen may be selected from; Angiopoietin-1 (Ang1), Angiopoietin 3, Angiopoietin 4, Angiopoietin 6; Del-1; Fibroblast growth factors: acidic (aFGF) and basic (bFGF); Follistatin; Granulocyte colony-stimulating factor (G-CSF); Hepatocyte growth factor (HGF) /scatter factor (SF); Interleukin-8 (IL-8); Leptin; Midkine; Placental growth factor; Platelet-derived endothelial cell growth factor (PD-ECGF); Platelet-derived growth factor-BB (PDGF-BB); Pleiotrophin (PTN); Progranulin; Proliferin; survivin; Transforming growth factor-alpha (TGF-alpha); Transforming growth factor-beta (TGF-beta); Tumor necrosis factor-alpha (TNF-alpha); Vascular endothelial growth factor (VEGF)/vascular permeability factor (VPF).

[0376] As described above and throughout, in some embodiments the first binding domain or the second binding domain, or the first and a second binding domain (TAA binding domain) comprises a single chain variable fragment (scFv). In some embodiments the first binding domain or the second binding domain, but not the first and the second binding domain (TAA binding domain) comprises a single chain variable fragment (scFv) that binds to an extracellular epitope of a Natural Killer (NK) cell antigen.

[0377] In some embodiments, the third binding domain comprises a Fab fragment. The specific structural order of components of a precursor tri-specific antibody construct, for example comprised in a polypeptide A and a polypeptide B, is described throughout in more detail.

[0378] In some embodiments, a precursor tri-specific antibody construct comprises at its core, an Fab fragment, which in some embodiments, comprises the third binding domain. As would be understood by the skilled person, a Fab fragment is the antigen-binding fragment of an antibody. The Fab is composed of one constant and one variable region of an immunoglobulin heavy and an immunoglobulin light chain. The heavy chain constant (CH) and variable (VH) regions heterodimerize with the light chain variable (VL) and constant (CL) regions and are usually covalently linked by a disulfide bond between the heavy and light chain constant regions (see e.g., the amino acid sequences presented in FIGS. 8A, 9A, 10A, 11A, 24A, 24B, 25, 26A, 26B, and 27 wherein the cysteine residues that may form a disulfide bond (Cys-S-S-Cys bond) between polypeptides A and B of a precursor construct are indicated). The codons encoding these Cys residues are indicated in the nucleic acid sequences presented in FIGS. 8B, 9B, 10B, and 11B. Thus, a skilled artisan would appreciate that the term “Fab” with regard to an antibody generally encompasses that portion of the antibody consisting of a single light chain (both variable and constant regions) bound to the variable region and first constant region of a single heavy chain by a disulfide bond.

[0379] As would be recognized by the skilled person, a disulfide bond between the heavy and light chain is preferable, but not essential for function (Orcutt, et al. (2010), PEDS, 23:221-228). Thus, in certain embodiments the Fab fragment disclosed herein may not comprise a disulfide bond. In this regard, the heavy and light chains may be engineered in such a way so as to stably interact without the need for disulfide bond. For example, in certain embodiments, the heavy or light chain can be engineered to remove a cysteine residue and wherein the heavy and light chains still stably interact and function as a Fab. In some embodiments, mutations are made to facilitate stable interaction between the heavy and light chains. For example, a “knobs into holes” engineering strategy can be used to facilitate dimerization between the heavy and light chains of a Fab (see e.g., 1996 Protein Engineering, 9:617-621). Using this strategy, “knobs” are created by replacing small amino acid side chains at the interface between interacting domains with larger ones. Corresponding “holes” are made at the interface between interacting molecules by replacing large side chains with smaller ones. Thus, also contemplated for use herein are variant Fab fragments designed for a particular purpose, for example, amino acid changes in the constant domains of CH1 and or CL, and removal of a disulfide bond or addition of tags for purification.

[0380] In some embodiments, the configuration of the variable and constant regions within the Fab fragment may be different from what is found in a native Fab. In other words, in one embodiment, the orientation of the variable and constant regions may be VH-CL in one chain and in another VL-CH (Shaefer et al. (2011), PNAS, 108:111870-92). Such modified Fab fragments still function to bind their particular target antigen and are contemplated for use in the precursor construct disclosed herein. Thus, in this regard the variable regions and constant regions that make up the Fab are considered modular.

[0381] In certain embodiments, the Fab fragments of this disclosure are derived from monoclonal antibodies and may be derived from antibodies of any type, including IgA, IgM, IgD, IgG, IgE and subtypes thereof, such as IgG1, IgG2, IgG3, and IgG4. The light chain domains may be derived from the kappa or lambda chain. The Fab fragments for use herein may be made recombinantly.

[0382] As is well known in the art, an antibody is an immunoglobulin molecule capable of specific binding to a target, such as a carbohydrate, polynucleotide, lipid, polypeptide, etc., through at least one epitope recognition site, located in the variable region of the immunoglobulin molecule. A skilled artisan would appreciate that the term “antibody” encompasses not only intact polyclonal or monoclonal antibodies, but also humanized antibodies, chimeric antibodies, antibody fragments including antibody fragments lacking an Fc region, and any other modified configuration of the immunoglobulin molecule that comprises an antigen-binding site or fragment (epitope recognition site) of the required specificity, including scFv fragments and Fab fragments. In some embodiments, the precursor antibody constructs described herein lack an Fc region.

[0383] The Fab fragment as disclosed herein, comprises an antigen-binding portion (third binding domain) comprised of an immunoglobulin heavy chain variable region and an immunoglobulin light chain variable region (VH and VL, respectively). Similarly, the scFv fragment described above (first or second binding domain), comprises an antigen-binding portion comprised of an immunoglobulin heavy chain variable region and an immunoglobulin light chain variable region (VH and VL, respectively). More specifically, the term “antigen-binding portion” as used herein refers to a polypeptide fragment that contains at least one CDR of an immunoglobulin heavy and/or light chain that binds to the target antigen of interest, such as the TAA of the first or second binding region, or a CD3 molecule of the third binding region. In this regard, an antigen-binding portion of the herein described precursor constructs may comprise 1, 2, 3, 4, 5, or all 6 CDRs of a VH and VL sequence of a parent antibody that binds to a target antigen of interest. In certain embodiments, the antigen-binding portion of the scFv fragment (first or second binding domain, or both first and second binding domains) of a precursor tri-specific antibody construct binds to a TAA, for example but not limited to a human EGFR. In certain embodiments, the antigen-binding portion of the Fab fragment of a precursor tri-specific antibody construct binds to CD3.

[0384] In certain embodiments, a specific VH and/or VL of the precursor tri-specific antibody construct described herein may be used to screen a library of the complementary variable region to identify VH/VL with desirable properties, such as increased affinity for a target antigen of interest. Such methods are described, for example, in Portolano et al., J. Immunol. (1993) 150:880-887; Clarkson et al., Nature (1991) 352:624-628.

[0385] Other methods may also be used to mix and match CDRs to identify Fab having desired binding activity (such as binding to CD3, or other target antigen of interest as described herein for other binding domains present in the precursor tri-specific antibody construct). For example: Klimka et al., British Journal of Cancer (2000) 83: 252-260, describe a screening process using a mouse VL and a human VH library with CDR3 and FR4 retained from the mouse VH. After obtaining antibodies, the VH was screened against a human VL library to obtain antibodies that bound antigen. Beiboer et al., J. Mol. Biol. (2000) 296:833-849 describe a screening process using an entire mouse heavy chain and a human light chain library. After obtaining antibodies, one VL was combined with a human VH library with the CDR3 of the mouse retained. Antibodies capable of binding antigen were obtained. Rader et al., PNAS (1998) 95:8910-8915 describe a process similar to Beiboer et al above.

[0386] These just-described techniques are, in and of themselves, known as such in the art. The skilled person will, however, be able to use such techniques to obtain antigen-binding fragments of antibodies according to several embodiments of the disclosure described herein, using routine methodology in the art.

[0387] Also disclosed herein is a method for obtaining an antibody antigen binding domain specific for a target antigen (e.g., CD3 or any target antigen described elsewhere herein for targets of binding domains described herein), the method comprising providing by way of addition, deletion, substitution or insertion of one or more amino acids in the amino acid sequence of a VH domain set out herein a VH domain which is an amino acid sequence variant of the VH domain, optionally combining the VH domain thus provided with one or more VL domains, and testing the VH domain or VH/VL combination or combinations to identify a specific binding member or an antibody antigen binding domain specific for a target antigen of interest (e.g., CD3) and optionally with one or more desired properties. The VL domains may have an amino acid sequence which is substantially as set out herein. An analogous method may be employed in which one or more sequence variants of a VL domain disclosed herein are combined with one or more VH domains.

[0388] A skilled artisan would appreciate that an epitope that “specifically binds” or “preferentially binds” (used interchangeably herein) to an antibody or a polypeptide is a term well understood in the art, and methods to determine such specific or preferential binding are also well known in the art. A molecule is said to exhibit “specific binding” or “preferential binding” if it reacts or associates more frequently, more rapidly, with greater duration and/or with greater affinity with a particular cell or substance than it does with alternative cells or substances. An antibody, or Fab or scFv thereof, “specifically binds” or “preferentially binds” to a target if it binds with greater affinity, avidity, more readily, and/or with greater duration than it binds to other substances. For example, an antibody that specifically or preferentially binds to a CD3 epitope is an antibody that binds one CD3 epitope with greater affinity, avidity, more readily, and/or with greater duration than it binds to other CD3 epitopes or non-CD3 epitopes. It is also understood by reading this definition that, for example, an antibody (or moiety or epitope) that specifically or preferentially binds to a first target may or may not specifically or preferentially bind to a second target. As such, “specific binding” or “preferential binding” does not necessarily require (although it can include) exclusive binding. Generally, but not necessarily, reference to binding means preferential binding.

[0389] In certain embodiments, antigen-binding portions of the Fab fragment (third binding domain) as described herein include a heavy chain and a light chain CDR set, respectively interposed between a heavy chain and a light chain framework region (FR) set which provide support to the CDRs and define the spatial relationship of the CDRs relative to each other. As used herein, the term “CDR set” refers to the three hypervariable regions of a heavy or light chain V region. Proceeding from the N-terminus of a heavy or light chain, these regions are denoted as “CDR1,” “CDR2,” and “CDR3” respectively. An antigen-binding site, therefore, includes six CDRs, comprising the CDR set from each of a heavy and a light chain V region. A polypeptide comprising a single CDR, (e.g., a CDR1, CDR2 or CDR3) is referred to herein as a “molecular recognition unit.” Crystallographic analysis of a number of antigen-antibody complexes has demonstrated that the amino acid residues of CDRs form extensive contact with bound antigen, wherein the most extensive antigen contact is with the heavy chain CDR3. Thus, the molecular recognition units are primarily responsible for the specificity of an antigen-binding site.

[0390] As used herein, the term “FR set” refers to the four flanking amino acid sequences which frame the CDRs of a CDR set of a heavy or light chain V region. Some FR residues may contact bound antigen; however, FRs are primarily responsible for folding the V region into the antigen-binding site, particularly the FR residues directly adjacent to the CDRs. Within FRs, certain amino residues and certain structural features are very highly conserved. In this regard, all V region sequences contain an internal disulfide loop of around 90 amino acid residues. When the V regions fold into a binding-site, the CDRs are displayed as projecting loop motifs which form an antigen-binding surface. It is generally recognized that there are conserved structural regions of FRs which influence the folded shape of the CDR loops into certain “canonical” structures-regardless of the precise CDR amino acid sequence. Further, certain FR residues are known to participate in non-covalent interdomain contacts which stabilize the interaction of the antibody heavy and light chains.

[0391] The structures and locations of immunoglobulin variable regions may be determined by reference to Kabat, E. A. et al., Sequences of Proteins of Immunological Interest. 4^{th} Edition. US Department of Health and Human Services. 1987, and updates thereof, now available on the Internet (94mmune.bme.nwu.edu).

[0392] A skilled artisan would recognize that the term “monoclonal antibody” encompasses a homogeneous antibody population wherein the monoclonal antibody is comprised of amino acids (naturally occurring and non-naturally occurring) that are involved in the selective binding of an epitope. Monoclonal antibodies are highly specific, being directed against a single epitope. The term “monoclonal antibody” encompasses not only intact monoclonal antibodies and full-length monoclonal antibodies, but also fragments thereof (such as Fab, Fab′, F(ab′)₂, Fv), single chain (scFv), variants thereof, fusion proteins comprising an antigen-binding portion, humanized monoclonal antibodies, chimeric monoclonal antibodies, and any other modified configuration of the immunoglobulin molecule that comprises an antigen-binding fragment (epitope recognition site) of the required specificity and the ability to bind to an epitope. It is not intended to be limited as regards the source of the antibody or the manner in which it is made (e.g., by hybridoma, phage selection, recombinant expression, transgenic animals, etc.). The term includes whole immunoglobulins as well as the fragments etc. as described herein.

[0393] The proteolytic enzyme papain preferentially cleaves IgG molecules to yield several fragments, two of which (the F(ab) fragments) each comprise a covalent heterodimer that includes an intact antigen-binding site. The enzyme pepsin is able to cleave IgG molecules to provide several fragments, including the F(ab′)2 fragment which comprises both antigen-binding sites. An Fv fragment for use according to certain embodiments as disclosed herein, can be produced by preferential proteolytic cleavage of an IgM, and on rare occasions of an IgG or IgA immunoglobulin molecule. Fv fragments are, however, more commonly derived using recombinant techniques known in the art. The Fv fragment includes a non-covalent VH::VL heterodimer including an antigen-binding site which retains much of the antigen recognition and binding capabilities of the native antibody molecule. Inbar et al. (1972) Proc. Nat. Acad. Sci. USA 69:2659-2662; Hochman et al. (1976) Biochem 15:2706-2710; and Ehrlich et al. (1980) Biochem 19:4091-4096.

[0394] In some embodiments of the present disclosure, the Fab fragment comprising a third binding domain binds to CD3. In some embodiments of the present disclosure, the Fab fragment comprising a third binding domain binds to CD3epsilon.

[0395] “T-cell receptor” (TCR) is a molecule found on the surface of T-cells that, along with CD3, is generally responsible for recognizing antigens bound to major histocompatibility complex (MHC) molecules. It consists of a disulfide-linked heterodimer of the highly variable (alpha) and (beta) chains in most T-cells. In other T-cells, an alternative receptor made up of variable Y and (delta) chains is expressed. Each chain of the TCR is a member of the immunoglobulin superfamily and possesses one N-terminal immunoglobulin variable region, one immunoglobulin constant region, a transmembrane region, and a short cytoplasmic tail at the C-terminal end (see, Abbas and Lichtman, Cellular and Molecular Immunology (5^{th} Ed.), Editor: Saunders, Philadelphia, 2003; Janeway et ai, Immunobiology: The Immune System in Health and Disease, 4^{th} Ed., Current Biology Publications, p 148, 149, and 172, 1999). TCR as used in the present disclosure may be from various animal species, including human, mouse, rat, or other mammals.

[0396] “Anti-TCR Fab” or “Anti-TCR precursor bispecific antibody construct”, refers to a Fab or a precursor tri-specific antibody construct comprising an Fab that specifically binds to a TCR molecule or one of its individual chains (e.g., TCR (alpha), TCR (beta), TCRY or TCR (delta) chain). In certain embodiments, an anti-TCR Fab binds to a TCR (alpha), a TCR (beta), or both. A skilled person would appreciate that the term “Anti-TCR Fab”, may in some embodiments encompass the third binding domain of a precursor tri-specific antibody construct described herein. In some embodiments, the term “Anti-TCR Fab” may encompass the precursor construct, wherein reference is being made to the binding attributes of the third binding domain.

[0397] “CD3” is known in the art as a multi-protein complex of six chains (see, Smith-Garvin et al., Annu Rev Immunol. 2009;27:591-619 )). In mammals, the complex comprises a CD3(gamma) chain, a CD3(delta) chain, two CD3(epsilon; ε) chains, and a homodimer of CD3(zeta) chains. The CD3(gamma), CD3(delta), and CD3(epsilon) chains are highly related cell surface proteins of the immunoglobulin superfamily containing a single immunoglobulin domain. The transmembrane regions of the CD3(gamma), CD3(delta), and CD3(epsilon) chains are negatively charged, which is a characteristic that allows these chains to associate with the positively charged T-cell receptor chains. The intracellular tails of the CD3(gamma), CD3(delta), and CD3(epsilon) chains each contain a single conserved motif known as an immunoreceptor tyrosine-based activation motif or ITAM, whereas each CD3(zeta) chain has three. Without wishing to be bound by theory, it is believed the ITAMs are important for the signaling capacity of a TCR complex. CD3 as used in the present disclosure may be from various animal species, including human, mouse, rat, or other mammals.

[0398] “Anti-CD3 Fab” as used herein, refers to a Fab comprising a third binding domain that specifically binds to individual CD3 chains (e.g., CD3(gamma) chain, CD3(delta) chain, or CD3(epsilon; ε) chain) or a complex formed from two or more individual CD3 chains (e.g., a complex of more than one CD3(epsilon) chains, a complex of a CD3(gamma) and CD3(epsilon) chain, a complex of a CD3(delta) and CD3(epsilon) chain). In certain embodiments, an anti-CD3 Fab specifically binds to a CD3(gamma), a CD3(delta), or a CD3(epsilon), or any combination thereof, and in certain embodiments, a CD3(epsilon). In some embodiments, an anti-CD3 Fab binds to the N-terminus of CD3 epsilon. In some embodiments, an anti-CD3 Fab binds to an extracellular epitope of CD3 epsilon.

[0399] In some embodiments, the anti-CD3 Fab binds to an epitope comprised within amino acids 1-27 of CD3 epsilon. In some embodiments, the anti-CD3 Fab binds to amino acids 1-27 of CD3 epsilon. In some embodiments, the anti-CD3 Fab binds to amino acids 1-27 of a human CD3 epsilon. Amino acids 1-27 of CD3 epsilon are set forth in SEQ ID NO: 5.

[0400] A skilled person would appreciate that the term “Anti-CD3 Fab”, may in some embodiments encompass the third binding domain of a precursor tri-specific antibody construct described herein. In some embodiments, the term “Anti-CD3 Fab” may encompass the precursor construct, wherein reference is being made to the binding attributes of the third binding domain.

[0401] In some embodiments, a third binding domain of a precursor construct comprises a Fab. In some embodiments, when referring to a third binding domain of a precursor construct the term “Fab” will be used, wherein the term encompasses a third bind domain of a precursor construct. In some embodiments, the term “Fab” may be used interchangeably with the phrase “third binding domain” having all the same qualities and meanings.

[0402] In some embodiments, a precursor tri-specific antibody construct comprises a third binding domain that binds to an extracellular epitope of CD3 epsilon. In some embodiments, a precursor tri-specific antibody construct comprises a third binding domain that binds to the N-terminus of CD3 epsilon. In some embodiments, a precursor tri-specific antibody construct comprises a third binding domain that binds to an epitope with amino acids 1-27 of CD3 epsilon. In some embodiments, the anti-CD3 Fab binds to amino acids 1-27 of CD3 epsilon. In some embodiments, the anti-CD3 Fab binds to amino acids 1-27 of a human CD3 epsilon. Amino acids 1-27 of CD3 epsilon are set forth in SEQ ID NO: 5.

[0403] “TCR complex,” as used herein, refers to a complex formed by the association of CD3 with TCR. For example, a TCR complex can be composed of a CD3(gamma) chain, a CD3(delta) chain, two CD3(epsilon) chains, a homodimer of CD3(zeta) chains, a TCR(alpha) chain, and a TCR(beta) chain. Alternatively, a TCR complex can be composed of a CD3(gamma) chain, a CD3(delta) chain, two CD3(epsilon) chains, a homodimer of CD3(zeta) chains, a TCRY chain, and a TCR(delta) chain.

[0404] “A component of a TCR complex,” as used herein, refers to a TCR chain (i.e., TCR(alpha), TCR(beta), TCRY or TCR(delta)), a CD3 chain (i.e., CD3(gamma), CD3(delta), CD3(epsilon) or CD3(zeta)), or a complex formed by two or more TCR chains or CD3 chains (e.g., a complex of TCR(alpha) and TCR(beta), a complex of TCRY and TCR(delta), a complex of CD3(epsilon) and CD3(delta), a complex of CD3(gamma) and CD3(epsilon), or a sub-TCR complex of TCR(alpha), TCR(beta), CD3(gamma), CD3(delta), and two CD3(epsilon) chains).

[0405] By way of background, the TCR complex is generally responsible for initiating a T-cell response to antigen bound to MHC molecules. It is believed that binding of a peptide:MHC ligand to the TCR and a co-receptor (i.e., CD4 or CD8) brings together the TCR complex, the co-receptor, and CD45 tyrosine phosphatase. This allows CD45 to remove inhibitory phosphate groups and thereby activate Lck and Fyn protein kinases. Activation of these protein kinases leads to phosphorylation of the ITAM on the CD3(zeta) chains, which in turn renders these chains capable of binding the cytosolic tyrosine kinase ZAP-70. The subsequent activation of bound ZAP-70 by phosphorylation triggers three signaling pathways, two of which are initiated by the phosphorylation and activation of PLC-(gamma), which then cleaves phosphatidylinositol phosphates (PIPs) into diacylglycerol (DAG) and inositol trisphosphate (IP3). Activation of protein kinase C by DAG leads to activation of the transcription factor NFKB. The sudden increase in intracellular free Ca2+ as a result of IP3 action activates a cytoplasmic phosphatase, calcineurin, which enables the transcription factor NFAT (nuclear factor of activated T-cells) to translocate form the cytoplasm to the nucleus. Full transcriptional activity of NFAT also requires a member of the AP-1 family of transcription factors; dimers of members of the Fos and Jun families of transcription regulators.

[0406] A third signaling pathway initiated by activated ZAP-70 is the activation of Ras and subsequent activation of a MAP kinase cascade. This culminates in the activation of Fos and hence of the AP-1 transcription factors. Together, NFKB, NFAT, and AP-1 act on the T-cell chromosomes, initiating new gene transcription that results in the differentiation, proliferation and effector actions of T-cells. See, Pitcher et al., 2003., TRENDS in Immunol. 24, 554-560; Smith-Garvin et al., Annu Rev Immunol. 2009;27:591-619 .

[0407] In certain embodiments, the Fab specifically binds to an individual human CD3 chain (e.g., human CD3(gamma) chain, human CD3(delta) chain, or human CD3(epsilon) chain) or a combination of two or more of the individual human CD3 chains (e.g., a complex of human CD3(gamma) and human CD3(epsilon) or a complex of human CD3(delta) and human CD3(epsilon)). In certain embodiments, the Fab specifically binds to a human CD3(epsilon) chain. In certain embodiments, the Fab specifically binds to an extracellular epitope of a human CD3(epsilon) chain. In certain embodiments, the Fab specifically binds to an epitope within SEQ ID NO: 3.

[0408] In certain embodiments, the third binding domain specifically binds to an individual human CD3 chain (e.g., human CD3(gamma) chain, human CD3(delta) chain, or human CD3(epsilon) chain) or a combination of two or more of the individual human CD3 chains (e.g., a complex of human CD3(gamma) and human CD3(epsilon) or a complex of human CD3(delta) and human CD3(epsilon)). In certain embodiments, the third binding domain specifically binds to a human CD3(epsilon) chain. In certain embodiments, the third binding domain specifically binds to an extracellular epitope of a human CD3(epsilon) chain. In certain embodiments, the third binding domain specifically binds to an epitope within SEQ ID NO: 3.

[0409] In certain other embodiments, a Fab of the present disclosure comprising a third binding domain specifically binds to TCR(alpha), TCR(beta), or a heterodimer formed from TCR(alpha) and TCR(beta). In certain embodiments, a Fab specifically binds to one or more of human TCR(alpha), human TCR(beta), or a heterodimer formed from human TCR(alpha) and human TCR(beta).

[0410] In certain embodiments, a Fab of the present disclosure comprising a third binding domain binds to a complex formed from one or more CD3 chains with one or more TCR chains, such as a complex formed from a CD3(gamma) chain, a CD3(delta) chain, a CD3(epsilon) chain, a TCR(alpha) chain, or a TCR(beta) chain, or any combination thereof. In other embodiments, a Fab of the present disclosure binds to a complex formed from one CD3(gamma) chain, one CD3(delta) chain, two CD3(epsilon) chains, one TCR(alpha) chain, and one TCR(beta) chain. In further embodiments, a Fab of the present disclosure binds to a complex formed from one or more human CD3 chains with one or more human TCR chains, such as a complex formed from a human CD3(gamma) chain, a human CD3(delta) chain, a human CD3(epsilon), a human TCR(alpha) chain, or a human TCR(beta) chain, or any combination thereof. In certain embodiments, a Fab of the present disclosure binds to a complex formed from one human CD3(gamma) chain, one human CD3(delta) chain, two human CD3(epsilon) chains, one human TCR(alpha) chain, and one human TCR(beta) chain.

[0411] Fabs of this disclosure can be generated as described herein or by a variety of methods known in the art (see, e.g., U.S. Pat. Nos. 6,291,161; 6,291,158). Sources of Fabs include monoclonal antibody nucleic acid sequences from various species (which can be formatted as antibodies, Fvs, scFvs or Fabs, such as in a phage library), including human, camelid (from camels, dromedaries, or llamas; Hamers-Casterman et al. (1993) Nature, 363:446 and Nguyen et al. (1998) J. Mol. Biol., 275:413), shark (Roux et al. (1998) Proc. Nat′l. Acad. Sci. (USA) 95:11804), fish (Nguyen et al. (2002) Immunogenetics, 54:39), rodent, avian, or ovine.

[0412] An anti-human CD3 antibody with cross reactivity to monkey CD3 is particularly desirable, such as the SP34 mouse monoclonal antibody, which binds specifically to human CD3 in denatured form (Western blot or dot blot) and in native form (on T-cells) (Pressano, S. The EMBO J. 4:337-344, 1985; Alarcon, B. EMBO J. 10:903-912, 1991). SP34 mouse monoclonal antibody also binds to CD3c singly transfected COS cells as well as CD3ε/γ or CD3.ε/δ double transfectants (Salmeron A. et al., J. Immunol. 147:3047-52, 1991). SP34 antibody also cross reacts non-human primates (Yoshino N. et al., Exp. Anim 49:97-110, 2000; Conrad M L. et al., Cytometry 71A:925-33, 2007). In addition, SP34 activates T-cell when cross-linked (Yang et al., J. Immunol. 137:1097-1100, 1986). Cross-reactivity to monkey CD3 is important as this allows toxicity studies to be carried out in non-human primates using the clinical candidate directly, rather than in chimpanzee or using a surrogate molecule. Thus, toxicity studies using such cross-reactive anti-CD3 Fab in a precursor bispecific antibody construct of the present disclosure provide more relevant safety assessments.

[0413] Other illustrative anti-CD3 antibodies include the Cris-7 monoclonal antibody (Reinherz, E. L. et al. (eds.), Leukocyte typing II., Springer Verlag, New York, (1986)), BC3 monoclonal antibody (Anasetti et al. (1990) J. Exp. Med. 172:1691), OKT3 (Ortho multicenter Transplant Study Group (1985) N. Engl. J. Med. 313:337) and derivatives thereof such as OKT3 ala-ala (Herold et al. (2003) J. Clin. Invest. 11:409), visilizumab (Carpenter et al. (2002) Blood 99:2712), and 145-2C11 monoclonal antibody (Hirsch et al. (1988) J. Immunol. 140: 3766). Further CD3 binding molecules contemplated for use herein include UCHT-1 (Beverley, P C and Callard, R. E. (1981) Eur. J. Immunol. 11: 329-334) and CD3 binding molecules described in WO2004/106380; WO2010/037838; WO2008/119567; WO2007/042261; WO2010/0150918, which are incorporated herein in their entirety.

[0414] In some embodiments, the amino acid sequence of a third binding region comprising an anti-CD3 epsilon binding activity comprises any anti-CD3epsilon sequence known in the art. In some embodiments, the amino acid sequence of a third binding region comprising binding activity to an anti-CD3 epsilon or a derivative thereof or an antibody fragment thereof, comprises any anti-CD3epsilon sequence known in the art. Examples of known anti-CD3 epsilon amino acid sequences may be found for example but no limit to U.S. Pats. Nos.: 9,822,180; 9,493,563; 9,587,021; 9,562,073; U.S. Published Application Nos.: 2013/0129729; 2017/0247476; 2016/0194399; 2010/0150918; 2018/0112011; and WO2017/162587, which all included herein in their entirety.

[0415] An exemplary anti-TCR antibody is H57 monoclonal antibody (Lavasani et al. (2007) Scandinavian Journal of Immunology 65:39-47).

[0416] Antigen binding fragment sequences (e.g., heavy and light chain variable region sequences) for Fab fragments may be available in public databases or using traditional strategies for hybridoma development using a CD3 chain, TCR component, or other Fab binding target as an immunogen in convenient systems (e.g., mice, HuMAb Mouse.RTM., TC Mouse.TM., KM-Mouse.RTM., llamas, chicken, rats, hamsters, rabbits, etc.) can be used to develop Fabs for use herein. As would be understood by the skilled person, Fab fragments may be generated using various technologies known in the art, including antibody display technologies such as phage, yeast, ribosome and mRNA display technologies; B cell culture technology such as SLAM technology; or using high throughput gene sequencing technologies on B cells or plasma B cells isolated from an immunized animal subject or immunized human subject.

[0417] In some embodiments, a third binding domain (an Fab) disclosed herein, comprises humanized FR amino acid sequence and native sequence of a mouse monoclonal antibody for the CDR amino acid sequences. Examples of anti-CD3 epsilon amino acid sequences wherein the FR sequences have been humanized while the CDR amino acid sequences remain those of the SP34 mouse monoclonal antibody, are disclosed in International Application Publication No. WO 2007/042261, which is incorporated here in its entirety.

[0418] Illustrative third binding domains (for example but not limited to anti-CD3 epsilon Fabs) sequences comprised within a precursor bispecific antibody construct of the present disclosure include the VH, CH1, VL, and CL amino acid sequences, and the polynucleotides encoding them, as set forth in Tables 1 and 2, respectively. Amino acid sequences comprising a third binding domain include those set forth as: SEQ ID NOs: 46-72 and 114 (VH) and 75-103 and 116 (VL) including CDRs thereof, such as those set forth in SEQ ID NOs: 104-112. In some embodiments, third binding domains (e.g., Fabs) sequences comprised within a precursor tri-specific antibody construct of the present disclosure include the VH, CH1, VL, and CL amino acid sequences, as set forth in Table 2, or a homolog thereof. In some embodiments, homologs of SEQ ID NOs: 46-72 and 114, and 75-103 and 116, maintain their CDR regions, for example as set for the in SEQ ID NOs: 104-112.

TABLE 2

Amino Acid Sequences of Anti-CD3 VH, VL, HC, LC, and CDR, and Combinations Thereof.

| SEQ ID NOs | Description |
|---|---|
| 45 | Mouse monoclonal SP34(mu) variable heavy chain |
| 46-72 | Variable Heavy chains |
| 73 | Variable Light chain from mouse monoclonal antibody SP34VL(mu) |
| 74, 461, 466, 468 | Variable Light chain and Constant Light Chain |
| 457, 465, 467 | Variable Heavy chain and Constant Heavy Chain |
| 75-103 | Variable Light chains |
| 104, 458 | CDR1 of Heavy Chain (CDR-H1) |
| 105, 459 | CDR2 of Heavy Chain (CDR-H2) |
| 106, 460 | CDR3 of Heavy Chain (CDR-H3) |
| 107, 108, 109, 462 | CDR1 of Light Chain (CDR-L1) |
| 110, 463 | CDR2 of Light Chain (CDR-L2) |
| 111, 112, 464 | CDR3 of Light Chain (CDR-L3) |
| 113 | anti-CD3 Variable Heavy chain and heavy constant region 1 |
| 114 | anti-CD3 epsilon VH |
| 115 | anti-CD3 epsilon Constant Heavy Chain. |
| 116 | anti-CD3 epsilon VL |
| 117 | anti-CD3 epsilon Constant Light Chain. |

[0419] In some embodiments, a third binding domain binds a CD3 epsilon polypeptide. In some embodiments, a third binding domain binds an extracellular domain of a human CD3 epsilon polypeptide. In some embodiments, a third binding domain comprises an Fab fragment comprising a variable heavy chain region (VH) comprising a CDR-H1, a CDR-H2, and a CDR-H3, and a variable light chain region (VL) comprising a CDR-L1, a CDR-L2, and a CDR-L3, wherein the third binding domain binds an extracellular domain of a human CD3 epsilon polypeptide. In some embodiments, a third binding domain binds to an epitope within SEQ ID NO: 3. In some embodiments, a third binding domain binds SEQ ID NO: 5.

[0420] In some embodiments, the amino acid sequence of an anti-human CD3 epsilon CDR-H1 is set forth in SEQ ID NO: 104. In some embodiments, the amino acid sequence of an anti-human CD3 epsilon CDR-H2 is set forth in SEQ ID NO: 105. In some embodiments, the amino acid sequence of an anti-human CD3 epsilon CDR-H3 is set forth in SEQ ID NO: 106. In some embodiments, the amino acid sequence of an anti-human CD3 epsilon CDR-L1 is set forth in any one of SEQ ID NOs: 107-109. In some embodiments, the amino acid sequences of an anti-human CD3 epsilon CDR-L2 is set forth in SEQ ID NO: 110. In some embodiments, the amino acid sequences of an anti-human CD3 epsilon CDR-L3 is set forth in SEQ ID NO: 111-112.

[0421] In some embodiments, a third binding domain comprises an Fab fragment comprising a variable heavy chain region (VH) and a variable light chain region (VL) that binds an extracellular domain of a human CD3 epsilon polypeptide. In some embodiments, the amino acid sequence of VH and VL for an anti-human CD3 epsilon are selected from the amino acid sequences set forth in any of SEQ ID NO: 46-72 and 114 (VH), and 75-103 and 116 (VL). In some embodiments, the amino acid sequence of VH and VL for an anti-human CD3 epsilon comprises a homolog of sequences selected from the amino acid sequences set forth in any of SEQ ID NO: 46-72 and 114 (VH), and 75-103 and 116 (VL).

[0422] In some embodiments, the amino acid sequence of a VH for a human CD3 epsilon third binding domain (VH1) are selected from the amino acid sequences set forth in any of SEQ ID NOs: 46-72 and 114, or a homolog thereof. In some embodiments, the amino acid sequence of a VL for a human CD3 epsilon third binding domain (VL1) are selected from the amino acid sequences set forth in any of SEQ ID NOs: 75-103 and 116, or a homolog thereof.

[0423] In some embodiments, homologues comprise polypeptides which are at least 50%, at least 55%, at least 60%, at least 65%, at least 70%, at least 75%, at least 80%, at least 85%, at least 87%, at least 89%, at least 91%, at least 93%, at least 95%, at least 96%, at least 97%, at least 98%, or at least 99% homologous to the amino acid sequence of variable light or variable heavy chains of anti-CD3epsilon. In some embodiments, homologues comprise polypeptides which are at least 50%, at least 55%, at least 60%, at least 65%, at least 70%, at least 75%, at least 80%, at least 85%, at least 87%, at least 89%, at least 91%, at least 93%, at least 95%, at least 96%, at least 97%, at least 98%, or at least 99% identical to the amino acid sequence of variable light or variable heavy chains of anti-CD3epsilon. In some embodiments, homologues comprise polypeptides which are at least 50%, at least 55%, at least 60%, at least 65%, at least 70%, at least 75%, at least 80%, at least 85%, at least 87%, at least 89%, at least 91%, at least 93%, at least 95%, at least 96%, at least 97%, at least 98%, or at least 99% homologous to an anti-human CD3 epsilon VH or an anti-human CD3 epsilon VL, respectively, as determined using BlastP software of the National Center of Biotechnology Information (NCBI) using default parameters.

[0424] In some embodiments, homology also encompasses deletion, insertion, or substitution variants, including an amino acid substitution, thereof and biologically active polypeptide fragments thereof. In one embodiment, the variant comprises conservative substitutions, or deletions, insertions, or substitutions that do not significantly alter the three-dimensional structure of the polypeptide of interest, e.g., VL or VH region, particularly in the areas of the CDR epitope binding regions. In some embodiments, the deletion, insertion, or substitution does not alter the function of interest of the anti-human CD3 epsilon Fab, which in some embodiments, is binding to a CD3 epsilon sequence on a target T-cell.

[0425] In some embodiments, a third binding domain binding to a CD3 epsilon extracellular epitope VH1 includes the sequences set forth in SEQ ID NOs: 46-72 and 114, or a homolog thereof. In some embodiments, a second binding domain binding to a CD3 epsilon extracellular epitope VL1 includes the sequences set forth in SEQ ID NO: 75-103 and 116, or a homolog thereof. In some embodiments, a third binding domain binding to a CD3 epsilon extracellular epitope comprises a sequence selected from the sequences set forth in SEQ ID NOs: 46-72, 74, and 114 or a homolog thereof, and a sequence selected from the sequences set forth in SEQ ID NOs: 75-103, 113, 115, and 116, or a homolog thereof. In some embodiments, a third binding domain binding to a CD3 epsilon extracellular epitope comprises the sequence set forth in SEQ ID NO: 113 or a homolog thereof, and the sequence set forth in SEQ ID NO: 74 or a homolog thereof.

[0426] In some embodiments, the third binding domain VL region comprises amino acid sequences as set forth for CDR-L1 (selected from SEQ ID NOs: 107-109, 462), CDR-L2 (SEQ ID NOs: 110, 463), and CDR-L3 (selected from SEQ ID NOs:111, 112, or 464), and the third binding domain VH region comprises CDR-H1 (SEQ ID NOs: 104, 458), CDR-H2 (SEQ ID NOs: 105, 459), and CDR-H3 (SEQ ID NOs: 106, 460).

[0427] In some embodiments of a precursor tri-specific antibody construct, the VL region of the third binding domain comprises the amino acid sequence set forth in any of SEQ ID NO: 75-103 and 116, or an amino acid sequence having at least 80% homology thereto. In some embodiments, a VL region of the third binding comprising an amino acid sequence having at least 80% homology thereto, comprises framework sequences having at least 80% homology, wherein the CDR regions are “as is” in the selected amino acid sequence (e.g. SEQ ID NOs: 107-112).

[0428] In some embodiments of a precursor tri-specific antibody construct, the VH region of the third binding comprises the amino acid sequence set forth in any of SEQ ID NO: 46-72 and 114, or an amino acid sequence having at least 80% homology thereto. In some embodiments, a VH region of the third binding comprising an amino acid sequence having at least 80% homology thereto, comprises framework sequences having at least 80% homology, wherein the CDR regions are “as is” in the selected amino acid sequence (e.g. SEQ ID NOs: 104-106).

[0429] In some embodiments, a first binding domain comprises a humanized binding domain. In some embodiments, a second binding domain comprises a humanized binding domain. In some embodiments, a third binding domain comprises a humanized binding domain. In some embodiments, a first, or a second or a third binding domain, or any combination thereof, comprises a humanized binding domain.

[0430] As would be understood by the skilled person and as described herein, in some embodiments, a complete antibody comprises two heavy chains and two light chains Each heavy chain consists of a variable region and a first, second, and third constant region, while each light chain consists of a variable region and a constant region. Mammalian heavy chains are classified as α, δ. E, γ, and µ, and mammalian light chains are classified as λ or κ. Immunoglobins comprising the α, δ. E, γ, and µ, heavy chains are classified as immunoglobin (Ig)A, IgD, IgE, IgG, and IgM. The complete antibody forms a “Y” shape. The stem of the Y consists of the second and third constant regions (and for IgE and IgM, the fourth constant region) of two heavy chains bound together and disulfide bonds (inter-chain) are formed in the hinge. Heavy chains γ, α, and δ have a constant region composed of three tandem (in a line) Ig domains, and a hinge region for added flexibility; heavy chains µ and ε have a constant region composed of four immunoglobulin domains. The second and third constant regions are referred to as “CH2 domain” and “CH3 domain”, respectively. Each arm of the Y includes the variable region and first constant region of a single heavy chain bound to the variable and constant regions of a single light chain. The variable regions of the light and heavy chains are responsible for antigen binding.

[0431] “Complementarity determining region” or “CDR” with regard to an antibody refers to a highly variable loop in the variable region of the heavy chain or the light chain of an antibody. CDRs can interact with the antigen conformation and largely determine binding to the antigen (although some framework regions are known to be involved in binding). The heavy chain variable region and the light chain variable region each contain 3 CDRs. The CDRs can be defined or identified by conventional methods, such as by sequence according to Kabat et al (Wu, T T and Kabat, E. A., J Exp Med. 132(2):211-50, (1970); Borden, P. and Kabat E. A., PNAS, 84: 2440-2443 (1987); Kabat, E. A. et al, Sequences of proteins of immunological interest, Published by DIANE Publishing, 1992), or by structure according to Chothia et al (Choithia, C. and Lesk, A. M., J. Mol. Biol., 196(4): 901-917 (1987), Choithia, C. et al, Nature, 342: 877-883 (1989)).

[0432] “Heavy chain variable region” or “VH” with regard to an antibody refers to the fragment of the heavy chain that contains three CDRs interposed between flanking stretches known as framework regions, which are more highly conserved than the CDRs and form a scaffold to support the CDRs.

[0433] “Light chain variable region” or “VL” with regard to an antibody refers to the fragment of the light chain that contains three CDRs interposed between framework regions.

[0434] “Fv” with regard to an antibody refers to the smallest fragment of the antibody to bear the complete antigen binding site. An Fv fragment consists of the variable region of a single light chain bound to the variable region of a single heavy chain.

[0435] “Single-chain Fv antibody” or “scFv” with regard to an antibody refers to an engineered antibody consisting of a light chain variable region and a heavy chain variable region connected to one another directly or via a peptide linker sequence.

[0436] “Single domain camel antibody” or “camelid VHH” as used herein refers to the smallest known antigen-binding unit of a heavy chain antibody (Koch-Nolte, et al, FASEB J., 21: 3490-3498 (2007)). A “heavy chain antibody” or a “camelid antibody” refers to an antibody that contains two VH domains and no light chains (Riechmann L. et al, J. Immunol. Methods 231:25-38 (1999); WO94/04678; WO94/25591; U.S. Pat. No. 6,005,079).

[0437] “Single domain antibody” or “dAb” refers to an antibody fragment that consists of the variable region of an antibody heavy chain (VH domain) or the variable region of an antibody light chain (VL domain) (Holt, L., et al, Trends in Biotechnology, 21(11): 484-490).

[0438] The term “disulfide bond” as used herein refers to the binding of a heavy chain fragment and a light chain fragment through one or more disulfide bonds. The one or more disulfide bonds can be formed between the two fragments by linking the thiol groups in the two fragments. In certain embodiments, the one or more disulfide bonds can be formed between one or more cysteine residues in the heavy chain fragment and the light chain fragment, respectively.

[0439] A “variable region linking sequence” is an amino acid sequence that connects a heavy chain variable region to a light chain variable region and provides a linker function compatible with interaction of the two sub-binding domains so that the resulting polypeptide retains a specific binding affinity to the same target molecule as an antibody that comprises the same light and heavy chain variable regions. In certain embodiments, a hinge useful for linking a binding domain to an immunoglobulin CH2 or CH3 region polypeptide may be used as a variable region linking sequence.

[0440] In some embodiments, a third binding domain comprises a heavy chain variable (VH) region and a light chain variable (VL) region, wherein said first or second regulatory domain is located N-terminally to said VL region or VH region of said third binding domain. In some embodiments, a third binding domain comprises a heavy chain variable (VH) region and a light chain variable (VL) region, wherein said first regulatory domain is located N-terminally to said VL region of said third binding domain, and a second regulatory domain is located N-terminally to said VH region of said third binding domain. In some embodiments, a third binding domain comprises a heavy chain variable (VH) region and a light chain variable (VL) region, wherein said first regulatory domain is located N-terminally to said VH region of the third binding domain, and the second regulatory domain is located N-terminally to said VL region of the third binding domain.

[0441] In some embodiments, a third binding domain comprises a heavy chain constant (CH1) region and a light chain constant (CL) region, wherein said first or second binding domain is located C-terminally to said CH1 region or CL region of said third binding domain. In some embodiments, a third binding domain comprises a heavy chain constant (CH1) region and a light chain constant (CL) region, wherein said first binding domain is located C-terminally to said CL region of said third binding domain, and a second binding domain is located C-terminally to said CH1 region of said third binding domain. In some embodiments, a third binding domain comprises a heavy chain constant (CH1) region and a light chain constant (CL) region, wherein said first binding domain is located C-terminally to said CH1 region of the third binding domain, and the second binding domain is located C-terminally to said CL region of the third binding domain. A skilled artisan would appreciate that the first and second regulatory domains are located N-terminally to the VH and VL, wherein when a first regulatory domain is located N-terminally to VH than the second regulatory domain is located N-terminally to the VL, and vice-versa when the second regulatory domain is located N-terminal to the VH of the third binding domain, the first regulatory domain is located N-terminally to the VL of the third binding domain. Similarly, the skilled artisan would appreciate that the first and second binding domains are located C-terminally to the CH1 and CL domains of the third binding domain, wherein when the first binding domain is located C-terminally to the CH1 the second binding domain is location C-terminally to the CL, and vice-versa, when the second binding domain is located C-terminally to the CH1, the first binding domain is located C-terminally to the CL of the third binding domain.

[0442] An alternative source of binding domains may include sequences that encode random peptide libraries or sequences that encode an engineered diversity of amino acids in loop regions of alternative non-antibody scaffolds, such as fibrinogen domains (see, e.g., Weisel et al. (1985) Science 230:1388), Kunitz domains (see, e.g., U.S. Pat. No. 6,423,498), lipocalin domains (see, e.g., WO 2006/095164), V-like domains (see, e.g., U.S. Pat. Application Publication No. 2007/0065431), C-type lectin domains (Zelensky and Gready (2005) FEBS J. 272:6179), or Fcab.TM. (see, e.g., PCT Patent Application Publication Nos. WO 2007/098934; WO 2006/072620), or the like.

[0443] As depicted in FIGS. 4-5, Fab third binding domains may comprise anti-NK cell surface antigen binding domains. For example, but not limited to anti-NKG2A or anti-NKG2D Fab third binding domains.

[0444] As depicted in the FIGS. 2-5, scFv are particularly illustrative binding domains. A first or second binding domain, or both a first and second binding domain, which in some embodiments comprises an scFv fragment, may bind to any of a variety of target molecules, including but not limited to a FcγRI, FcγRIIa FcγRIIb FcγRIIIa FcγRIIIb, CD28, CD137, CTLA-4, FAS, fibroblast growth factor receptor 1 (FGFR1), FGFR2, FGFR3, FGFR4, glucocorticoid-induced TNFR-related (GITR) protein, lymphotoxin-beta receptor (LTβR), toll-like receptors (TLR), tumor necrosis factor-related apoptosis-inducing ligand-receptor 1 (TRAIL receptor 1) and TRAIL receptor 2, prostate-specific membrane antigen (PSMA) protein, prostate stem cell antigen (PSCA) protein, tumor-associated protein carbonic anhydrase IX (CAIX), epidermal growth factor receptor 1 (EGFR1), EGFRvIII, human epidermal growth factor receptor 2 (Her2/neu; Erb2), ErbB3 also known as HER3, Folate receptor, ephrin receptors, PDGFRa, ErbB-2, CD20, CD22, CD30, CD33, CD40, CD37, CD38, CD70, CD74, CD56, CD40), CD80, CD86, CD2, p53, cMet also known as tyrosine-protein kinase Met or hepatocyte growth factor receptor (HGFR), MAGE-A1, MAGE-A2, MAGE-A3, MAGE-A4, MAGE-A6, MAGE-A10, MAGE-A12, BAGE, DAM-6, -10, GAGE-1, -2, -8, GAGE-3, -4, -5, -6, -7B, NA88-A, NY-ESO-1, BRCA1, BRCA2, MART-1, MC1R, Gp100, PSA, PSM, Tyrosinase, Wilms’ tumor antigen (WT1), TRP-1, TRP-2, ART-4, CAMEL, Cyp-B, hTERT, hTRT, iCE, MUC1, MUC2, P-cadherin, Myostatin (GDF8), Cripto (TDGF1), MUC5AC, PRAME, P15, RU1, RU2, SART-1, SART-3, WT1, AFP, β-catenin/m, Caspase-8/m, CDK-4/m, ELF2M, GnT-V, G250, HSP70-2M, HST-2, KIAA0205, MUM-1, MUM-2, MUM-3, Myosin/m, RAGE, SART-2, TRP-2/INT2, 707-AP, Annexin II, CDC27/m, TPI/mbcr-abl, ETV6/AML, LDLR/FUT, Pml/RARa, TEL/AML1, CD28, CD137, CanAg, Mesothelin, DR5, PD-1, PD1L, IGF-1R, CXCR4, Neuropilin 1, Glypicans, EphA2, CD138, B7-H3, B7-H4, gpA33, GPC3, SSTR2, ROR1, 5T4, an NK surface antigen, or a VEGF-R2. In some embodiments, a TAA comprises a PSMA, CD30, B7-H3, B7-H4, gpA33, HER2, P-cadherin, gp100, DR5, GPC3, SSTR2, Mesothelin, ROR1, 5T4, Folate receptor, an NK surface antigen, or an EGFR. In some embodiments, a TAA is selected from the group consisting of a PSMA, an ROR1, a 5T4, and an EGFR. These and other tumor proteins or tumor associated proteins are known to the skilled artisan.

[0445] In certain embodiments, the first or second binding domain, or both the first and second binding domain specifically binds to an antigen target that is associated with a disease condition. The disease condition may include a physiological condition, a pathological condition and a cosmetic condition. Examples of illustrative conditions include, without limitation, cancer, inflammatory disorders, allograft transplantation, type I diabetes, type II diabetes, and multiple sclerosis.

[0446] In some embodiments, the specific structural components of a precursor tri-specific antibody construct comprise a first and second binding domain, for example but not limited to an scFv fragment, a third binding domain, for example but not limited to an Fab fragment, linker regions, and a first and second regulatory domain, where said regulatory domains may each comprise a protease cleavable domain and an HSA polypeptide sequence or a protease cleavable domain and a CAP component, and linkers, or any combination thereof, as have been described herein detail.

[0447] In some embodiments, a precursor tri-specific antibody construct comprises two polypeptides. In some embodiments, these polypeptides may be identified based on the Heavy chain (HC) or Light chain (LC) components based of the third binding domain. In some embodiments, these polypeptides may be identified as polypeptide A and polypeptide B. In some embodiments, polypeptide A comprises a HC polypeptide and polypeptide B comprises a LC polypeptide. In other embodiments, polypeptide A comprises a LC polypeptide and polypeptide B comprises a HC polypeptide.

[0448] In some embodiments, a precursor tri-specific antibody construct described herein, comprises a third binding domain comprising a heavy chain variable (VH) region and a light chain variable (VL) region; wherein a first binding domain is located C-terminally to said CL or said CH1 region of the third binding domain; wherein when said first binding domain is located C-terminally to said CL region, said second binding domain is located C-terminally to said CH1 region, and when said first binding domain is located C-terminally to said CH1 region, said second binding domain is located C-terminally to said CL region. In some embodiments, a precursor tri-specific antibody construct described herein, comprises a third binding domain comprising a heavy chain variable (VH) region and a light chain variable (VL) region;
[0449] wherein said first and second binding domains are located as described above, and
[0450] wherein said first regulatory domain, comprising said HLP domain located N-terminally to said protease cleavage domain, is located N-terminally to said VH region or to said VL region of said third binding domain;
[0451] wherein (a) when said first regulatory domain is located N-terminally to said VL region, said second regulatory domain, comprising said CAP component located N-terminally to said protease cleavage domain, is located N-terminally to said VH region, and (b) when said first regulatory domain is located N-terminally to said VH region, said second regulatory domain comprising said CAP component located N-terminally to said protease cleavage domain, is located N-terminally to said VL region.

[0452] A skilled artisan would appreciate that the designations “Polypeptide A” and “Polypeptide B” are merely names indicating two heterologous polypeptide chains, and as such the names themselves may be interchanged or change, e.g., Polypeptide 1 and Polypeptide 2. Further, encompassed by this terminology are two structurally different polypeptide chains that together form a precursor tri-specific antibody construct, as described herein. Further, the skilled artisan would appreciate the modular nature of the precursor constructs described herein, wherein modules may be substituted one for another, wherein they provide similar or different activities. For example, but not limited to, an scFv may have to order N-terminus to C-terminus VL-VH or VH-VL; or a regulatory domain may comprise a CAP component or a HLP domain.

[0453] One skilled in the art would appreciate that a masking regulatory domain linked may be linked to the C-terminal region of Polypeptide A if the binding region were to an NK antigen, and could in another embodiment, be linked instead to polypeptide B if said binding region were to an NK antigen, or in yet another embodiment, a regulatory domain with a CAP could be linked at both the C-terminal of a polypeptide A and a polypeptide B if the first and second binding regions were both to NK antigens.

[0454] In some embodiments, the first or second regulatory domains are components of either the HC or LC and may be positioned N-terminal to the third binding domain, or C-terminal to a first or second binding domain, and the first or second binding domains comprises scFv, wherein the components of the scFv (VL, L, and VH) are independently ordered VL-L-VH or VH-L-VL, are positioned C-terminal to the third binding domain, and are components of either the HC or LC, respectively.

[0455] A skilled artisan would appreciate that different regulatory domains may be included with a precursor construct depending on the desired functionality of the precursor construct. For example, a tri-specific precursor construct may comprise just a single regulatory domain, either an HLP domain or a CAP domain (See FIGS. 2-5, respectively).

[0456] In some embodiments, the precursor tri-specific antibody construct comprises two polypeptides, polypeptide A and polypeptide B, each of which comprising one or more heavy chain variable region (VH) and one or more light chain variable region (VL), with linkers where appropriate, and each polypeptide is linked to a regulatory domain such as a HLP domain or a CAP component. Examples of these polypeptide A and polypeptide B include:
[0457] (a) polypeptide A comprises components having an order N-terminal to C-terminal: HLP domain, protease cleavage domain, VH of the third binding domain, first binding domain comprising first VH-first VL; and polypeptide B comprises components having an order N-terminal to C-terminal: CAP component, protease cleavage domain, VL of the third binding domain, second binding domain comprising second VH-second VL; or
[0458] (b) polypeptide A comprises components having an order N-terminal to C-terminal: HLP domain, protease cleavage domain, VH of the third binding domain, first binding domain comprising first VL-first VH; and polypeptide B comprises components having an order N-terminal to C-terminal: CAP component, protease cleavage domain, VL of the third binding domain, second binding domain comprising second VH-second VL; or
[0459] (c) polypeptide A comprises components having an order N-terminal to C-terminal: HLP domain, protease cleavage domain, VH of the third binding domain, first binding domain comprising first VH-first VL; and polypeptide B comprises components having an order N-terminal to C-terminal: CAP component, protease cleavage domain, VL of the third binding domain, second binding domain comprising second VL-second VH; or
[0460] (d) polypeptide A comprises components having an order N-terminal to C-terminal: HLP domain, protease cleavage domain, VH of the third binding domain, first binding domain comprising first VL-first VH; and polypeptide B comprises components having an order N-terminal to C-terminal: CAP component, protease cleavage domain, VL of the third binding domain, second binding domain comprising second VL-second VH; or
[0461] (e) polypeptide A comprises components having an order N-terminal to C-terminal: CAP component, protease cleavage domain, VH of the third binding domain, first binding domain comprising first VH-first VL; and polypeptide B comprises components having an order N-terminal to C-terminal: HLP domain, protease cleavage domain, VL of the third binding domain, second binding domain comprising second VH-second VL; or
[0462] (f) polypeptide A comprises components having an order N-terminal to C-terminal: CAP component, protease cleavage domain, VH of the third binding domain, first binding domain comprising first VL-first VH; and polypeptide B comprises components having an order N-terminal to C-terminal: HLP domain, protease cleavage domain, VL of the third binding domain, second binding domain comprising second VH-second VL; or
[0463] (g) polypeptide A comprises components having an order N-terminal to C-terminal: CAP component, protease cleavage domain, VH of the third binding domain, first binding domain comprising first VH-first VL; and polypeptide B comprises components having an order N-terminal to C-terminal: HLP domain, protease cleavage domain, VL of the third binding domain, second binding domain comprising second VL-second VH; or
[0464] (h) polypeptide A comprises components having an order N-terminal to C-terminal: CAP component, protease cleavage domain, VH of the third binding domain, first binding domain comprising first VL-first VH; and polypeptide B comprises components having an order N-terminal to C-terminal: HLP domain, protease cleavage domain, VL of the third binding domain, second binding domain comprising second VL-second VH.

[0465] In one embodiment, the third binding domain is a Fab, and the first and second binding domains are scFv. In one embodiment, the Fab binds to a T cell surface antigen, one scFv binds to a TAA and the other scFv binds to a NK cell surface antigen. In another embodiment, the Fab binds to a NK cell surface antigen, one scFv binds to a TAA and the other scFv binds to another NK cell surface antigen.

[0466] In other embodiments, the precursor tri-specific antibody construct comprises two polypeptides, polypeptide A and polypeptide B, and instead of linking a regulatory domain to each polypeptide, only one polypeptide is linked to a regulatory domain, for example,
[0467] (a) polypeptide A comprises components having an order N-terminal to C-terminal: VH of the third binding domain, first binding domain comprising first VH-first VL; and polypeptide B comprises components having an order N-terminal to C-terminal: VL of the third binding domain, second binding domain comprising second VH-second VL, wherein a regulatory domain is located N-terminal to either polypeptide A or B, the regulatory domain comprises components having an order N-terminal to C-terminal: a CAP component, a half-life prolonging (HLP) domain, and a protease cleavage domain; or
[0468] (b) polypeptide A comprises components having an order N-terminal to C-terminal: VH of the third binding domain, first binding domain comprising first VL-first VH; and polypeptide B comprises components having an order N-terminal to C-terminal: VL of the third binding domain, second binding domain comprising second VH-second VL, wherein a regulatory domain is located N-terminal to either polypeptide A or B, the regulatory domain comprises components having an order N-terminal to C-terminal: a CAP component, a half-life prolonging (HLP) domain, and a protease cleavage domain; or
[0469] (c) polypeptide A comprises components having an order N-terminal to C-terminal: VH of the third binding domain, first binding domain comprising first VH-first VL; and polypeptide B comprises components having an order N-terminal to C-terminal: VL of the third binding domain, second binding domain comprising second VL-second VH, wherein a regulatory domain is located N-terminal to either polypeptide A or B, the regulatory domain comprises components having an order N-terminal to C-terminal: a CAP component, a half-life prolonging (HLP) domain, and a protease cleavage domain; or
[0470] (d) polypeptide A comprises components having an order N-terminal to C-terminal: VH of the third binding domain, first binding domain comprising first VL-first VH; and polypeptide B comprises components having an order N-terminal to C-terminal: VL of the third binding domain, second binding domain comprising second VL-second VH, wherein a regulatory domain is located N-terminal to either polypeptide A or B, the regulatory domain comprises components having an order N-terminal to C-terminal: a CAP component, a half-life prolonging (HLP) domain, and a protease cleavage domain.

[0471] In some embodiments as described above, the third binding domain may bind to a T cell surface antigen, the first binding domain may bind to a TAA and the second binding domain may bind to a NK cell surface antigen. In another embodiment, the third binding domain may bind to a NK cell surface antigen, the first binding domain may bind to a TAA and the second binding domain may bind to another NK cell surface antigen. In some embodiments, when the second binding domain bind to a NK cell surface antigen, the second binding domain may further comprise a regulatory CAP component, for example:
[0472] (a) polypeptide A comprises components having an order N-terminal to C-terminal: HLP domain, protease cleavage domain, VH of the third binding domain, first binding domain comprising first VH-first VL; and polypeptide B comprises components having an order N-terminal to C-terminal: CAP component, protease cleavage domain, VL of the third binding domain, second binding domain comprising second VH-second VL, protease cleavage domain, and a second CAP component; or
[0473] (b) polypeptide A comprises components having an order N-terminal to C-terminal: HLP domain, protease cleavage domain, VH of the third binding domain, first binding domain comprising first VL-first VH; and polypeptide B comprises components having an order N-terminal to C-terminal: CAP component, protease cleavage domain, VL of the third binding domain, second binding domain comprising second VH-second VL, protease cleavage domain, and a second CAP component; or
[0474] (c) polypeptide A comprises components having an order N-terminal to C-terminal: HLP domain, protease cleavage domain, VH of the third binding domain, first binding domain comprising first VH-first VL; and polypeptide B comprises components having an order N-terminal to C-terminal: CAP component, protease cleavage domain, VL of the third binding domain, second binding domain comprising second VL-second VH, protease cleavage domain, and a second CAP component; or
[0475] (d) polypeptide A comprises components having an order N-terminal to C-terminal: HLP domain, protease cleavage domain, VH of the third binding domain, first binding domain comprising first VL-first VH; and polypeptide B comprises components having an order N-terminal to C-terminal: CAP component, protease cleavage domain, VL of the third binding domain, second binding domain comprising second VL-second VH, protease cleavage domain, and a second CAP component; or
[0476] (e) polypeptide A comprises components having an order N-terminal to C-terminal: CAP component, protease cleavage domain, VH of the third binding domain, first binding domain comprising first VH-first VL; and polypeptide B comprises components having an order N-terminal to C-terminal: HLP domain, protease cleavage domain, VL of the third binding domain, second binding domain comprising second VH-second VL, protease cleavage domain, and a second CAP component; or
[0477] (f) polypeptide A comprises components having an order N-terminal to C-terminal: CAP component, protease cleavage domain, VH of the third binding domain, first binding domain comprising first VL-first VH; and polypeptide B comprises components having an order N-terminal to C-terminal: HLP domain, protease cleavage domain, VL of the third binding domain, second binding domain comprising second VH-second VL, protease cleavage domain, and a second CAP component; or
[0478] (g) polypeptide A comprises components having an order N-terminal to C-terminal: CAP component, protease cleavage domain, VH of the third binding domain, first binding domain comprising first VH-first VL; and polypeptide B comprises components having an order N-terminal to C-terminal: HLP domain, protease cleavage domain, VL of the third binding domain, second binding domain comprising second VL-second VH, protease cleavage domain, and a second CAP component; or
[0479] (h) polypeptide A comprises components having an order N-terminal to C-terminal: CAP component, protease cleavage domain, VH of the third binding domain, first binding domain comprising first VL-first VH; and polypeptide B comprises components having an order N-terminal to C-terminal: HLP domain, protease cleavage domain, VL of the third binding domain, second binding domain comprising second VL-second VH, protease cleavage domain, and a second CAP component.

[0480] In another embodiment, the second binding domain may comprise a regulatory CAP component as described above, wherein only one polypeptide (A or B) is linked to a regulatory domain comprising another CAP component, for example:
[0481] (a) polypeptide A comprises components having an order N-terminal to C-terminal: VH of the third binding domain, first binding domain comprising first VH-first VL; and polypeptide B comprises components having an order N-terminal to C-terminal: VL of the third binding domain, second binding domain comprising second VH-second VL, protease cleavage domain, and a CAP component, wherein a regulatory domain is located N-terminal to either polypeptide A or B, the regulatory domain comprises components having an order N-terminal to C-terminal: a second CAP component, a half-life prolonging (HLP) domain, and a protease cleavage domain; or
[0482] (b) polypeptide A comprises components having an order N-terminal to C-terminal: VH of the third binding domain, first binding domain comprising first VL-first VH; and polypeptide B comprises components having an order N-terminal to C-terminal: VL of the third binding domain, second binding domain comprising second VH-second VL, protease cleavage domain, and a CAP component, wherein a regulatory domain is located N-terminal to either polypeptide A or B, the regulatory domain comprises components having an order N-terminal to C-terminal: a second CAP component, a half-life prolonging (HLP) domain, and a protease cleavage domain; or
[0483] (c) polypeptide A comprises components having an order N-terminal to C-terminal: VH of the third binding domain, first binding domain comprising first VH-first VL; and polypeptide B comprises components having an order N-terminal to C-terminal: VL of the third binding domain, second binding domain comprising second VL-second VH, protease cleavage domain, and a CAP component, wherein a regulatory domain is located N-terminal to either polypeptide A or B, the regulatory domain comprises components having an order N-terminal to C-terminal: a second CAP component, a half-life prolonging (HLP) domain, and a protease cleavage domain; or
[0484] (d) polypeptide A comprises components having an order N-terminal to C-terminal: VH of the third binding domain, first binding domain comprising first VL-first VH; and polypeptide B comprises components having an order N-terminal to C-terminal: VL of the third binding domain, second binding domain comprising second VL-second VH, protease cleavage domain, and a CAP component, wherein a regulatory domain is located N-terminal to either polypeptide A or B, the regulatory domain comprises components having an order N-terminal to C-terminal: a second CAP component, a half-life prolonging (HLP) domain, and a protease cleavage domain.

[0485] In certain embodiments, the first and third binding domains are those as described above, whereas the second binding domain comprises a cytokine receptor engager, for example:
[0486] (a) polypeptide A comprises components having an order N-terminal to C-terminal: HLP domain, protease cleavage domain, VH of the third binding domain, first binding domain comprising first VH-first VL; and polypeptide B comprises components having an order N-terminal to C-terminal: CAP component, protease cleavage domain, VL of the third binding domain, and a second binding domain comprising a cytokine receptor engager; or
[0487] (b) polypeptide A comprises components having an order N-terminal to C-terminal: HLP domain, protease cleavage domain, VH of the third binding domain, first binding domain comprising first VL-first VH; and polypeptide B comprises components having an order N-terminal to C-terminal: CAP component, protease cleavage domain, VL of the third binding domain, and a second binding domain comprising a cytokine receptor engager; or
[0488] (c) polypeptide A comprises components having an order N-terminal to C-terminal: CAP component, protease cleavage domain, VH of the third binding domain, first binding domain comprising first VH-first VL; and polypeptide B comprises components having an order N-terminal to C-terminal: HLP domain, protease cleavage domain, VL of the third binding domain, and a second binding domain comprising a cytokine receptor engager; or
[0489] (d) polypeptide A comprises components having an order N-terminal to C-terminal: CAP component, protease cleavage domain, VH of the third binding domain, first binding domain comprising first VL-first VH; and polypeptide B comprises components having an order N-terminal to C-terminal: HLP domain, protease cleavage domain, VL of the third binding domain, and a second binding domain comprising a cytokine receptor engager.

[0490] In some embodiments, the second binding domain comprises a cytokine receptor engager, wherein only one polypeptide (A or B) is linked to a regulatory domain, for example:
[0491] (a) polypeptide A comprises components having an order N-terminal to C-terminal: VH of the third binding domain, first binding domain comprising first VH-first VL; and polypeptide B comprises components having an order N-terminal to C-terminal: VL of the third binding domain, and a second binding domain comprising a cytokine receptor engager, wherein a regulatory domain is located N-terminal to either polypeptide A or B, the regulatory domain comprises components having an order N-terminal to C-terminal: a CAP component, a half-life prolonging (HLP) domain, and a protease cleavage domain; or
[0492] (b) polypeptide A comprises components having an order N-terminal to C-terminal: VH of the third binding domain, first binding domain comprising first VL-first VH; and polypeptide B comprises components having an order N-terminal to C-terminal: VL of the third binding domain, and a second binding domain comprising a cytokine receptor engager, wherein a regulatory domain is located N-terminal to either polypeptide A or B, the regulatory domain comprises components having an order N-terminal to C-terminal: a CAP component, a half-life prolonging (HLP) domain, and a protease cleavage domain; or
[0493] (c) polypeptide A comprises components having an order N-terminal to C-terminal: VH of the third binding domain, first binding domain comprising first VH-first VL; and polypeptide B comprises components having an order N-terminal to C-terminal: VL of the third binding domain, and a second binding domain comprising a cytokine receptor engager, wherein a regulatory domain is located N-terminal to either polypeptide A or B, the regulatory domain comprises components having an order N-terminal to C-terminal: a CAP component, a half-life prolonging (HLP) domain, and a protease cleavage domain; or
[0494] (d) polypeptide A comprises components having an order N-terminal to C-terminal: VH of the third binding domain, first binding domain comprising first VL-first VH; and polypeptide B comprises components having an order N-terminal to C-terminal: VL of the third binding domain, and a second binding domain comprising a cytokine receptor engager, wherein a regulatory domain is located N-terminal to either polypeptide A or B, the regulatory domain comprises components having an order N-terminal to C-terminal: a CAP component, a half-life prolonging (HLP) domain, and a protease cleavage domain.

[0495] In some embodiments, the second binding domain comprises an IL-15 polypeptide, wherein only one polypeptide (A or B) is linked to a regulatory domain, for example:
[0496] (a) polypeptide A comprises components having an order N-terminal to C-terminal: VH of the third binding domain, first binding domain comprising first VH-first VL; and polypeptide B comprises components having an order N-terminal to C-terminal: VL of the third binding domain, and a second binding domain comprising a IL-15 polypeptide, wherein a regulatory domain is located N-terminal to either polypeptide A or B, the regulatory domain comprises components having an order N-terminal to C-terminal: a CAP component, a half-life prolonging (HLP) domain, and a protease cleavage domain; or
[0497] (b) polypeptide A comprises components having an order N-terminal to C-terminal: VH of the third binding domain, first binding domain comprising first VL-first VH; and polypeptide B comprises components having an order N-terminal to C-terminal: VL of the third binding domain, and a second binding domain comprising an IL-15 polypeptide, wherein a regulatory domain is located N-terminal to either polypeptide A or B, the regulatory domain comprises components having an order N-terminal to C-terminal: a CAP component, a half-life prolonging (HLP) domain, and a protease cleavage domain; or
[0498] (c) polypeptide A comprises components having an order N-terminal to C-terminal: VH of the third binding domain, first binding domain comprising first VH-first VL; and polypeptide B comprises components having an order N-terminal to C-terminal: VL of the third binding domain, and a second binding domain comprising an IL-15 polypeptide, wherein a regulatory domain is located N-terminal to either polypeptide A or B, the regulatory domain comprises components having an order N-terminal to C-terminal: a CAP component, a half-life prolonging (HLP) domain, and a protease cleavage domain; or
[0499] (d) polypeptide A comprises components having an order N-terminal to C-terminal: VH of the third binding domain, first binding domain comprising first VL-first VH; and polypeptide B comprises components having an order N-terminal to C-terminal: VL of the third binding domain, and a second binding domain comprising an IL-15 polypeptide, wherein a regulatory domain is located N-terminal to either polypeptide A or B, the regulatory domain comprises components having an order N-terminal to C-terminal: a CAP component, a half-life prolonging (HLP) domain, and a protease cleavage domain.

[0500] In certain embodiments, a first or second binding domain, or both a first and second binding domain, or a first or second regulatory domain, or both a first and second regulatory domain, or a combination thereof are linked directly to the respective termini of the VH-CH1 or VL-CL of the third binding domain, e.g., an Fab (i.e., with no additional amino acids added between). In other embodiments, the linking with the third binding domain, e.g., an Fab, comprises use of a linker as described above (with additional amino acids as described below). In some embodiments, it may be necessary to delete several amino acids (e.g., from 1-3 amino acids or from 1-10 amino acids; e.g., 1, 2, 3, 4, 5, 6, 7, 8, 9, or 10 amino acids) from the C-terminus of a given first or second binding domain or both, and/or a first or second regulatory domain or both, depending on the third binding domain target and the surrounding space of the first and second binding domain targets on the cell surface (i.e., for example, accessibility of the CD3 epsilon target on the cell surface of a T-cell).

[0501] In other embodiments, it may be necessary to delete several amino acids (e.g., from 1-3 amino acids or from 1-10 amino acids; e.g., 1, 2, 3, 4, 5, 6, 7, 8, 9, or 10 amino acids) from the N-terminus of the heavy and/or light chain of the third binding domain. In yet further embodiments, it may be necessary to delete several amino acids (e.g., from 1-3 amino acids or from 1-10 amino acids; e.g., 1, 2, 3, 4, 5, 6, 7, 8, 9, or 10 amino acids) from the N-terminus of the first or second binding domains or both, and/or the C-terminus of the first or second regulatory domains or both, and at the same time, to delete several amino acids (e.g., from 1-3 amino acids or from 1-10 amino acids; e.g., 1, 2, 3, 4, 5, 6, 7, 8, 9, or 10 amino acids) from the N-terminus and/or C-terminus of a third binding domain chain (VH-CH1 or VL-CL). The length and the sequence of the junction between a first or second binding domain, and/or a first or second regulatory domain, and the third binding domain VH-CH1 and VL-CL chains can be the same or different.

[0502] The junction between the first or second binding domain or both, and /or the first or second regulatory domain or both, and the third binding domain VH-CH1 and VL-CL chains may make use of a combination of deletions and linkers as needed. As would be understood by the skilled artisan, the junction between the third binding domain VH-CH1 and VL-CL chains and the first or second binding domain or both and/or the first or second regulatory domain or both, can be adjusted accordingly and tested for desired functionality (e.g., binding affinity, T-cell activity) using methods known in the art and described herein.

[0503] As described herein, junctions between domain or between components within domains comprises linkers. In some embodiments, a linker is present between domains. In some embodiments, there is not a linker between domains. In some embodiments, a linker is present between components that comprise a domain. In some embodiments, there is not a linker between components that comprise a domain.

[0504] FIGS. 2-5 show graphically where linkers may exist in an embodiment of precursor tri-specific antibody constructs disclosed herein.

[0505] In some embodiments, the linker between a first or second binding domain or both and a third binding domain VH-CH1 or VL-CL is 1-10 amino acids long. In other embodiments, the linker between a first or second binding domain or both, and a third binding domain VH-CH1 or VL-CL is 1-20 or 20 amino acids long. In this regard, the linker may be 1, 2, 3, 4, 5, 6, 7, 8, 9, 10, 11, 12, 13, 14, 15, 16, 17, 18, 19 or 20 amino acids long. In further embodiments, the linker may be 21, 22, 23, 24, 25, 26, 27, 28, 29 or 30 amino acids long.

[0506] In some embodiments, the linker between a first or second regulatory domain or both and a third binding domain VH-CH1 or VL-CL is 1-10 amino acids long. In other embodiments, the linker between a first or second regulatory domain or both, and a third binding domain VH-CH1 or VL-CL is 1-20 or 20 amino acids long. In this regard, the linker may be 1, 2, 3, 4, 5, 6, 7, 8, 9, 10, 11, 12, 13, 14, 15, 16, 17, 18, 19 or 20 amino acids long. In further embodiments, the linker may be 21, 22, 23, 24, 25, 26, 27, 28, 29 or 30 amino acids long.

[0507] In some embodiments, the linker between components within a first or second binding domain or both is 1-10 amino acids long. In other embodiments, the linker between components within a first or second binding domain or both is 1-20 or 20 amino acids long. In this regard, the linker between components may be 1, 2, 3, 4, 5, 6, 7, 8, 9, 10, 11, 12, 13, 14, 15, 16, 17, 18, 19 or 20 amino acids long. In further embodiments, the linker between components may be 21, 22, 23, 24, 25, 26, 27, 28, 29 or 30 amino acids long.

[0508] In some embodiments, the linker between components within a first or second regulatory domain or both is 1-10 amino acids long, wherein it should be understood that a linker between different components need not be the same length. In other embodiments, the linker between components within a first or second regulatory domain or both is 1-20 or 20 amino acids long, wherein it should be understood that a linker between different components need not be the same length. In this regard, the linker between each set of components may be 1, 2, 3, 4, 5, 6, 7, 8, 9, 10, 11, 12, 13, 14, 15, 16, 17, 18, 19 or 20 amino acids long. In further embodiments, the linker between each set of components may be 21, 22, 23, 24, 25, 26, 27, 28, 29 or 30 amino acids long.

[0509] In some embodiments, there are linkers between components within an HC or LC Fab polypeptide components VH and CH1, and polypeptide components VL and CL, respectively. In some embodiments, a linker is 1-10 amino acids long, wherein it should be understood that a linker between different components need not be the same length. In other embodiments, the linker between components within a third binding domain is 1-20 or 20 amino acids long, wherein it should be understood that a linker between different components need not be the same length. In this regard, the linker between each set of components may be 1, 2, 3, 4, 5, 6, 7, 8, 9, 10, 11, 12, 13, 14, 15, 16, 17, 18, 19 or 20 amino acids long. In further embodiments, the linker between each set of components may be 21, 22, 23, 24, 25, 26, 27, 28, 29 or 30 amino acids long.

[0510] In certain embodiments, linkers suitable for use in the precursor constructs described herein are flexible linkers. Suitable linkers can be readily selected and can be of any of a suitable of different lengths, such as from 1 amino acid (e.g., Gly) to 20 amino acids, from 2 amino acids to 15 amino acids, from 3 amino acids to 12 amino acids, including 4 amino acids to 10 amino acids, 5 amino acids to 9 amino acids, 6 amino acids to 8 amino acids, or 7 amino acids to 8 amino acids, and may be 1, 2, 3, 4, 5, 6, or 7 amino acids.

[0511] In some embodiments, flexible linkers include glycine polymers (G)n, glycine-serine polymers (including, for example, (GS)n, (GSGGS)n (SEQ ID NO: 119) and (GGGS)n (SEQ ID NO: 120), where n is an integer of at least one), glycine-alanine polymers, alanine-serine polymers, and other flexible linkers known in the art. Glycine and glycine-serine polymers are relatively unstructured, and therefore may be able to serve as a neutral tether between components. Glycine accesses significantly more phi-psi space than even alanine and is much less restricted than residues with longer side chains (see Scheraga, Rev. Computational Chem. 11173-142 (1992)). In some embodiments, flexible linkers include, but are not limited to Gly-Gly-Ser-Gly (GGSG; SEQ ID NO: 121), Gly-Gly-Ser-Gly-Gly (GGSGG; SEQ ID NO: 122), Gly-Ser-Gly-Ser-Gly (GSGSG; SEQ ID NO: 123), Gly-Ser-Gly-Gly-Gly (GSGGG; SEQ ID NO: 124), Gly-Gly-Gly-Ser-Gly (GGGSG; SEQ ID NO: 125), Gly-Ser-Ser-Ser-Gly (GSSSG; SEQ ID NO: 126), Gly-Gly-Ser-Gly-Gly-Ser (GGSGGS; SEQ ID NO: 165) and the like. The ordinarily skilled artisan will recognize that design of a precursor tri-specific antibody construct can include linkers that are all or partially flexible, such that the linker can include a flexible linker as well as one or more portions that confer less flexible structure to provide for a desired precursor tri-specific antibody construct structure.

[0512] In some embodiments, a flexible linker used in a precursor construct comprises any flexible linker known in the art. In some embodiments, a flexible linker comprises a flexible unstructured linker. Linkers known in the art have been describe at least in Chengcheng Liu, Ju Xin Chin, Dong-Yup Lee; SynLinker: an integrated system for designing linkers and synthetic fusion proteins, Bioinformatics, Volume 31, Issue 22, 15 Nov. 2015, Pages 3700-3702; Fusion protein linkers: property, design and functionality Chen X et al, Adv Drug Deliv Rev. 2013 Oct;65(10):1357-69; The Linker Data base provided by The Centre for Integrative Bioinformatics vrije Universiteit Amsterdam (http://www.ibi.vu.nl/programs/linkerdbwww); and the CSD Linker Database provided by The Cambridge Crystallographic Data Centre (https://www.ccdc.cam.ac.uk/solutions/partnersoftware/csdlinkerdatabase/).

[0513] In certain embodiments, the linker between the third binding domain and the first or second binding domain or both, or the first or second regulatory domain or, or both binding and regulatory domains is a stable linker (not cleavable by protease, especially MMPs). In certain embodiments, the linker is a peptide linker.

[0514] In some embodiments, the linker between the third binding domain VH-CH1 or VL-CL chains and a first or second regulatory domain or both, comprises a protease substrate cleavage sequence, for example, an MMP substrate cleavage sequence. In some embodiments, the linker between the third binding domain VH-CH1 or VL-CL chains and a first or second regulatory domain or both, comprises a protease substrate cleavage sequence, for example, an MMP2/9, uPA, matriptase, and legumain substrate cleavage sequence. A peptide sequence of SEQ ID NO: 9 in a substrate can be cleaved by most MMPs. A peptide sequence of SEQ ID NO: 35 in a substrate can be cleaved by MMP2/9, uPA, matriptase, and legumain.

[0515] A protease substrate cleavage sequence refers to a peptide sequence that can be cleaved by protease treatment. An MMP substrate sequence refers to a peptide sequence that can be cleaved by incubation with a MMP. SEQ ID NO: 9 is a commonly used MMP substrate cleavage sequence (see e.g., Jiang, PNAS (2004) 101:17867-72; Olson, PNAS (2010) 107:4311-6). In another embodiment, the protease cleavage site is recognized by MMP-2, MMP-9 or a combination thereof. In yet another embodiment, the protease site comprises the sequence selected from the group consisting of (SEQ ID NO: 9, SEQ ID NO: 10, SEQ ID NO: 11, and SEQ ID NO: 35). In a further embodiment, the protease site comprises the sequence set forth in SEQ ID NO: 35.

[0516] In some embodiments, all of the protease sites comprise the same proteolytic sequence. In other embodiments, the protease sites of a precursor construct differ. Differences of the proteolytic sequences within a precursor construct may provide for additional regulation of function of the precursor or partially activated construct.

[0517] A stable linker or a protease non-cleavable linker refers to a linker peptide sequence that does not belong to the known protease substrate sequences and thus does not lead to significant cleavage product formation upon incubation with a protease.

[0518] In some embodiments, the cleavage substrate (or cleavage sequence or protease cleavage domain) of the linker may include an amino acid sequence that can serve as a substrate for a protease, usually an extracellular protease. In other embodiments, the cleavage sequence comprises a cysteine-cysteine pair capable of forming a disulfide bond, which can be cleaved by action of a reducing agent. In other embodiments the cleavage sequence comprises a substrate capable of being cleaved upon photolysis.

[0519] The cleavage substrate is positioned in the linker such that when the cleavage substrate is cleaved by a cleaving agent (e.g., a cleavage substrate of a linker is cleaved by the protease and/or the cysteine-cysteine disulfide bond is disrupted via reduction by exposure to a reducing agent) or by light-induced photolysis, in the presence of a target, resulting in cleavage products having various functional properties as described herein.

[0520] The cleavage substrate of a linker may be selected based on a protease that is co-localized in the diseased tissue, or on the surface of the cell that expresses the target antigen of interest of a binding domain of a fusion moiety. A variety of different conditions are known in which a target of interest is co-localized with a protease, where the substrate of the protease is known in the art. In the example of cancer, the target tissue can be a cancerous tissue, particularly cancerous tissue of a solid tumor. There are reports in the literature of increased levels of proteases having known substrates in a number of cancers, e.g., solid tumors. (See, e.g., La Rocca et al, (2004) British J. of Cancer 90(7): 1414-1421). Non-limiting examples of disease include: all types of cancers (breast, lung, colorectal, prostate, head and neck, pancreatic, etc), rheumatoid arthritis, Crohn’s disease, melanomas, SLE, cardiovascular damage, ischemia, etc. Furthermore, anti-angiogenic targets, such as VEGF, are known. As such, where the binding domains of a fusion moiety of the precursor tri-specific antibody construct of the present disclosure is selected such that it is capable of binding a TAA/NK, a suitable cleavage substrate sequence for a protease cleavable linker will be one which comprises a peptide substrate that is cleavable by a protease that is present at the cancerous treatment site, particularly that is present at elevated levels at the cancer treatment site as compared to non-cancerous tissues.

[0521] In some embodiments, the first or second binding domain or both of a precursor tri-specific antibody construct can bind, e.g., Her2, and the cleavage substrate sequence can be a matrix metalloprotease (MMP) substrate, and thus is cleavable by an MMP. In other embodiments, the first or second binding domain or both of a fusion moiety in the precursor tri-specific antibody construct can bind a target of interest or two targets of interest, and the cleavage substrate present in the linker can be, for example, legumain, plasmin, TMPRSS-¾, MMP-9, MT1-MMP, cathepsin, caspase, human neutrophil elastase, beta-secretase, uPA, or PSA. In other embodiments, the first or second binding domain or both of a fusion moiety in the precursor tri-specific antibody construct can bind a target of interest or two targets of interest, and the cleavage substrate present in the linker can be, for example, a combination of MMP2/9, legumain, uPA, and matriptase. In some embodiments, the first or second binding domain or both of a fusion moiety in the precursor tri-specific antibody construct can bind a target of interest or two targets of interest, and the cleavage substrate present in the linker comprises a combination of MMP2/9, legumain, uPA, and matriptase as set forth in SEQ ID NO: 35. In other embodiments, the cleave substrate is cleaved by other disease-specific proteases, in diseases other than cancer such as multiple sclerosis or rheumatoid arthritis.

[0522] The unmodified or uncleaved linker can allow for tethering the binding domains (first, second, or third, or a combination thereof) and regulatory domains (first or second, or both).

[0523] The linkers of the precursor tri-specific antibody construct (e.g., the linker between the CH 1 or CL of the third binding domain and a first or second binding domain or both, and the linker between the VH or VL of the third binding domain and a first or second regulatory domain or both, can comprise the same cleavage substrate or may comprise different cleavage substrates, e.g., the first linker may comprise a first cleavage substrate and the second linker may comprise a second cleavage substrate, etc. The cleavage substrates can be different substrates for the same enzyme (for example exhibiting different binding affinities to the enzyme), or different substrates for different enzymes, or one of the cleavage substrates can be an enzyme substrate and another of the cleavage substrate can be a photolysis substrate, or another cleavage substrate can be a substrate for reduction, or any combination thereof.

[0524] In some embodiments, some of the linkers may be non-cleavable while the others of the linkers are cleavable linker. For example, but not limited to the linkers between the Fab CH1 and CL and the first and second binding domain are non-cleavable, while the linkers between the Fab VH and VL and the first and second regulatory domains are cleavable. A skilled artisan would appreciate that there are a limited number of combinations of the linkers, and in some embodiments, each linker may be cleavable or non-cleavable. Thus, in some embodiments, a linker between the third binding domain and a first or second regulatory domain or both is cleavable while the linker between the third binding domain and the first or second binding domain or both is not cleavable.

[0525] For specific cleavage by an enzyme, contact between the enzyme and the cleavage substrate is made. When the precursor tri-specific antibody construct is present within a microenvironment comprising sufficient enzyme activity, the cleavage substrate can be cleaved. Sufficient enzyme activity can refer to the ability of the enzyme to make contact with the linker having the cleavage substrate and effect cleavage. It can readily be envisioned that an enzyme may be in the vicinity of the precursor tri-specific antibody construct but unable to cleave because of other cellular factors or protein modification of the enzyme.

[0526] In some embodiments, substrates can include but are not limited to substrates cleavable by one or more of the following enzymes or proteases: ADAM10; Caspase 8, Cathepsin S, MMP 8, ADAM12, Caspase 9, FAP, MMP 9, ADAM17, Caspase 10, Granzyme B, MMP-13, ADAMTS, Caspase 11, Guanidinobenzotase (GB), MMP 14, ADAMTS5. Caspase 12, Hepsin, MT-SP1, BACE, Caspase 13, Human Neutrophil Elastase Neprilysin (HNE), Caspases, Caspase 14, Legumain, NS¾A, Caspase 1, Cathepsins, Matriptase 2, Plasmin, Caspase 2, Cathepsin A, Meprin, PSA, Caspase 3, Cathepsin B, MMP 1, PSMA, Caspase 4, Cathepsin D, MMP 2, TACE, Caspase 5, Cathepsin E, MMP 3, TMPRSS ¾, Caspase 6, Cathepsin K, MMP 7, uPA, Caspase 7, Matripase (MT-SP1, TADG-15, epithin, ST14), and MT1-MMP.

[0527] In other embodiments, the cleavage substrate can involve a disulfide bond of a cysteine pair, which is thus cleavable by a reducing agent such as, for example, but not limited to a cellular reducing agent such as glutathione (GSH), thioredoxins, NADPH, flavins, ascorbate, and the like, which can be present in large amounts in tissue of or surrounding a solid tumor.

[0528] Other appropriate protease cleavage sites for use in the cleavable linkers herein are known in the art or may be identified using methods such as those described by Turk et al., 2001 Nature Biotechnology 19, 661-667.

[0529] In certain embodiments, the linker can be a peptide linker, a thiol residue-containing peptide linker, such as a cysteine residue, a polymer linker or a chemical linker. In certain embodiments, the precursor tri-specific antibody construct comprises a linker where one end of the linker is covalently linked to the N-terminal of a first or second binding domain or both fusion moiety, and the other end of the linker is covalently linked to the C-terminal of the CH1 or CL of the third binding domain.

[0530] In some embodiment, there is just one or a few amino acids between domains or components within domains. In certain embodiments, there may be one or a few amino acid residues between two domains of a precursor tri-specific antibody construct, such as between a binding domain and a linker polypeptide, such as amino acid residues resulting from construct design of the precursor construct (e.g., amino acid residues resulting from the use of a restriction enzyme site during the construction of a nucleic acid molecule encoding the polypeptide chains (polypeptide A and polypeptide B). As described herein, such amino acid residues may be referred to “junction amino acids” or “junction amino acid residues”, or “peptide linkers”.

[0531] In certain illustrative embodiments, a peptide linker is between 1 to 5 amino acids, between 5 to 10 amino acids, between 5 to 25 amino acids, between 5 to 50 amino acids, between 10 to 25 amino acids, between 10 to 50 amino acids, between 10 to 100 amino acids, or any intervening range of amino acids. In other illustrative embodiments, a peptide linker comprises about 1, 5, 10, 15, 20, 25, 30, 35, 40, 45, 50 or more amino acids in length.

[0532] Such junctional amino acids link any of the domains or components within domain of the precursor tri-specific antibody construct. In certain embodiments, the junctional amino acid(s) is a hinge, or a part of a hinge as defined herein. In certain embodiments, a variable region linking sequence useful for connecting a heavy chain variable region to a light chain variable region may be used as a peptide linker.

[0533] In one illustrative embodiment, peptide linker sequences contain, for example, Gly, Asn and Ser residues. Other near neutral amino acids, such as Thr and Ala, may also be included in the linker sequence.

[0534] Other amino acid sequences which may be usefully employed as linkers include those disclosed in Maratea et al., Gene 40:39 46 (1985); Murphy et al., Proc. Natl. Acad. Sci. USA 83:8258 8262 (1986); U.S. Pat. No. 4,935,233 and U.S. Pat. No. 4,751,180, incorporated herein in their entirety.

[0535] Other illustrative linkers may include, for example, Glu-Gly-Lys-Ser-Ser-Gly-Ser-Gly-Ser-Glu-Ser-Lys-Val-Asp (EGKSSGSGSESKVD; SEQ ID NO: 127) (Chaudhary et al., 1990, Proc. Natl. Acad. Sci. U.S.A. 87:1066-1070) and Lys-Glu-Ser-Gly-Ser-Val-Ser-Ser-Glu-Gln-Leu-Ala-Gln-Phe-Arg-Ser-Leu-Asp (KESGSVSSEQLAQFRSLD; SEQ ID NO: 128) (Bird et al., 1988, Science 242:423-426).

[0536] In some embodiments, linker sequences are not required when the HC and LC polypeptides (polypeptides A and B) have non-essential N-terminal amino acid regions that can be used to separate the functional domains and prevent steric interference. Coding sequences or domains of the precursor tri-specific antibody construct of the present disclosure can be fused directly without any junctional amino acids or by using a flexible polylinker composed, for example, of the pentamer Gly-Gly-Gly-Gly-Ser (GGGGS; SEQ ID NO: 129) repeated 1 to 3 times. Such a linker has been used in constructing single chain antibodies (scFv) by being inserted between VH and VL (Bird et al., 1988, Science 242:423-426; Huston et al., 1988, Proc. Natl. Acad. Sci. U.S.A. 85:5979-5883).

[0537] Examples of linkers include, but are not limited to, those having the sequences of (GS)n, SEQ ID NO:716; (GS)n(GGS)n, SEQ ID NO:119; (GS)n(GGGS)n, SEQ ID NO:717; (GS)n(GGGGS)n, SEQ ID NO:718; (GGS)n, SEQ ID NO:719; (GGS)n(GGGS)n, SEQ ID NO:720; (GGS)n(GGGGS)n, SEQ ID NO:721; (GGGS)n, SEQ ID NO:120; (GGGS)n(GGGGS)n, SEQ ID NO:722; (GGGGS)n, SEQ ID NO: 129; or (SGGGS)n, SEQ ID NO:723, wherein the “n” in these sequences equal to 1, 2, 3, 4, 5, 6,7, 8, 9 or 10.

[0538] A peptide linker, in certain embodiments, is designed to enable the correct interaction between two beta-sheets forming the variable region of the single chain antibody. Any suitable linkers can be used to make an indirect link, such as without limitation, peptide linker, polymer linker, and chemical linker. In certain embodiments, the covalent link is an indirect link through a peptide linker.

[0539] A distinguishing characteristic of the precursor tri-specific antibody construct, as described herein, is that the precursor construct does not depend on steric hindrance to reduce or inhibit the binding affinity of the third binding domain. In the case of the precursor constructs described herein, reduction or inhibition of binding affinity is due to specific binding between a CAP component and a third binding domain of the precursor construct. On the contrary, the proteins described in US 2012/0321626 depend solely on three-dimensional structure for reduced specificity, wherein the polypeptides may or may not form such a three-dimensional structure, and thus they lack any specificity for the reduction or inhibition of binding to the antibody target of the second binding region. Further distinguishing characteristics in comparison with other multi- or tri-specific antibodies that include a mask, is that the reduction or inhibition of binding to a target of the third binding domain by precursor tri-specific antibody construct, may also be temporally controlled, wherein reduction or inhibition of binding to a target of the third binding domain may be maintained when the precursor construct is in circulation in vivo or within a non-tumor microenvironment. This may reduce negative side effects caused by the use of multi- or bi-specific antibodies lacking this temporal regulation.

[0540] In some embodiments, precursor tri-specific antibody constructs of the present disclosure comprise a Polypeptide A (HC polypeptide) comprising the amino acid sequences set forth in SEQ ID NO: 130, or a homologue thereof; and a Polypeptide B (LC polypeptide) comprising the amino acid sequence set forth in SEQ ID NO: 131. In some embodiments, precursor tri-specific antibody constructs of the present disclosure comprise a Polypeptide A (HC polypeptide) comprising the amino acid sequences set forth in SEQ ID NO:132, or a homologue thereof; and a Polypeptide B (LC polypeptide) comprising the amino acid sequence set forth in SEQ ID NO: 133.

[0541] In some embodiments, precursor tri-specific antibody constructs of the present disclosure comprise a Polypeptide A (HC polypeptide) encoded by the nucleotide sequence set forth in SEQ ID NO: 142, or a homologue thereof; and comprise a Polypeptide B (LC polypeptide) encoded by the nucleotide sequence set forth in SEQ ID NO: 143. In some embodiments, precursor tri-specific antibody constructs of the present disclosure comprise a Polypeptide A (HC polypeptide) encoded by the nucleotide sequence set forth in SEQ ID NO: 144, or a homologue thereof; and comprise a Polypeptide B (LC polypeptide) encoded by the nucleotide sequence set forth in SEQ ID NO: 145.

### Functionality of Precursor Tri-specific Antibody Constructs

[0542] In some embodiments, a precursor tri-specific antibody construct disclosed herein possesses many unique features and these features can be utilized to develop human therapeutics with desirable attributes in drug safety, efficacy and manufacturability. In some embodiments, the precursor tri-specific antibody constructs of this disclosure comprising a first and a second binding domain binding to cell surface tumor associated antigens (TAA) and or to an extracellular epitope of a Natural Killer (NK) cell, a third binding domain binding to an extracellular epitope of human CD3 epsilon, and two regulatory domains, possesses many unique features and these features can be utilized to develop human therapeutics with desirable attributes in drug safety, efficacy and manufacturability. These features have been described in detail above and will not necessarily be repeated herein. A skilled artisan would appreciate that the uses as described herein below, include use of the many embodiments of precursor tri-specific antibody constructs as described above.

[0543] As described herein, the property of a precursor construct comprising a regulatable extended half-life, a regulatory reduction of T-cell binding (reduction of T-cell activation), or a combination thereof, may be used advantageously in the precursor tri-specific antibody construct of the present disclosure to mask T-cell binding until the precursor tri-specific antibody construct are in an appropriate microenvironment (e.g., in the vicinity of a tumor). In some embodiments, a pharmaceutical composition comprises a precursor tri-specific antibody construct, as described herein, and a pharmaceutically acceptable carrier.

[0544] A skilled artisan would recognize that in some embodiments, the term “precursor tri-specific antibody construct” may be used interchangeably with the term “drug” having all the same meanings and qualities. In some embodiments, a drug comprising a precursor tri-specific antibody construct comprises a pharmaceutical composition.

[0545] In some embodiments, a precursor tri-specific antibody disclosed herein comprises a first binding domain binding to a TAA, a second binding domain binding to a NK cell surface antigen, and a third binding domain binding to a T cell surface antigen or a NK cell surface antigen. A precursor tri-specific antibody comprising these three binding domains and regulatory domains comprising for example, a cleavable half-life prolonging domain comprising a protease cleavable domain and a human serum albumin (HSA) polypeptide (a first sub-regulatory domain), and a cleavable masking domain comprising a protease cleavable domain and a CAP region (a second sub-regulatory domain), provides unique properties as described throughout.

[0546] The precursor tri-specific antibody construct of the present disclosure functions to enhance drug stability, specificity, selectivity, potency, and safety and the convenience of drug administration. In certain embodiments, the third binding domain, when expressed without the regulatory domain comprising said CAP region linked to its N-terminus (VH or VL chain), is able to bind to its target antigen in soluble recombinant form (usually the extracellular domain of a receptor protein, e.g., a T-cell receptor component such as CD3) as well as on the cell surface. In certain embodiments, the third binding domain, when expressed with a regulatory domain fused to its N-terminus (VL or VH chain) and comprising a CAP region, and a first and a second binding domain fused to the C-terminus (CL or CH1 chains), has no binding or has reduced binding to its specific antigen presented on a T or NK cell surface at pharmacological concentrations of the drug (concentration of the polypeptide in treated patients) compared with a third binding domain present in a construct lacking a regulatory domain comprising a CAP region. Lack of binding or greatly reduced binding to a surface antigen in the absence of the target antigen binding by a third binding domain may be explained by the dramatically reduced affinity resulting from the specific blocking of the antigen binding site by a CAP component.

[0547] Lack of binding or greatly reduced binding to cell surface antigen, for example an antigen on a T-cell or NK cell, in the absence of the TAA target antigen binding by a first binding domain, may be viewed as a desirable property for use of a precursor tri-specific antibody construct as a human therapeutic. It is important to note that lack of binding or significantly reduced binding of the precursor tri-specific antibody construct alone (in the absence of tumor target cells) to, e.g., T or NK cells can, 1) dramatically improve the undesirable systematic T or NK cell activation, therefore to dramatically improve the drug safety profile; 2) dramatically improve the feasibility of subcutaneous route of drug administration; and 3) dramatically increase the drug tolerability of high drug concentration in blood circulation. Further, the regulatable temporal regulation provided by a second regulatory domain comprising a half-life prolonging component (e.g., an HSA polypeptide) of a precursor construct may ensure the extended presence of the precursor construct in circulation until such time as the drug is present in the environment of TAA target cells (e.g., tumor target cell microenvironment).

[0548] It is important to note that T-cell binding by antibodies such as OKT3 or UCHT-1 via conformational epitopes may transduce partial signaling, leading either to unwanted T-cell activation (causing cytokine storm) or T-cell anergy (resulting in T-cells unable to kill tumor cells). Mu-lF3, hu-1F3 and its variants binding to a linear epitope of CD3 is conceivably less likely to induce T-cell signaling in the absence of cross linking of the CD3. This property may be advantageous for reducing systemic side effects that occur when using OKT3 and UCHT-1 like antibodies.

[0549] It is also important to note that once a regulatory domain comprising a CAP region or a portion thereof comprising the CAP region in a precursor tri-specific antibody construct is cleaved by protease, its function such that the specific binding inhibition at the third antigen-binding site (e.g., CD3 epsilon binding site) is removed so that it can then bind to its target with high affinity, particularly target antigens expressed on the cell surface. Therefore, following cleavage at the cleavage substrate sequence in a protease cleavable linker (thereby releasing a regulatory domain comprising a CAP region and releasing a regulatory domain comprising a HLP) the precursor tri-specific antibody construct is converted into a more potent cross linker between tumor and T-cells (FIG. 1). In some embodiments, the regulatory domain comprising the HLP is not cleaved, yet the precursor construct is converted into a more potent cross linker between tumor and T-cells.

[0550] Similarly, once a regulatory domain comprising a CAP region able to associated with a binding region in a precursor tri-specific antibody construct is cleaved by protease, its function such that the specific binding inhibition at the antigen-binding site (e.g., NK antigen binding site) is removed so that it can then bind to its target with high affinity. In some embodiments, the precursor tri-specific antibody construct is converted into a more potent cross linker between NK cells, tumor cells and T-cells (FIG. 1). In some embodiments, when the precursor tri-specific antibody construct comprises an NK engager only (no other TAA binding site) the construct is converted into a more potent cross linker between NK cells and T-cells. In some embodiments, the regulatory domain comprising the HLP is not cleaved, yet the precursor construct is converted into a more potent cross linker between tumor, NK cells, and T-cells, or NK cells and T-cells.

[0551] Furthermore, it is important to note that once a TAA first binding domain binds to its target antigen, the precursor tri-specific antibody construct molecules become highly concentrated on a tumor cell surface to create high avidity based binding toward the third binding domain target on T cells or NK cells. Therefore, only in the presence of the TAA first binding domain is the third antigen-binding domain able to bind its target, for precursor tri-specific antibody construct to function as a cross-linker between tumor, NK cells, and T-cells.

[0552] The properties of the precursor tri-specific antibody construct of the present disclosure allow for relatively high dose of the precursor tri-specific antibody construct in circulation for an enhanced period of time, without unwanted side-effects, e.g., the precursor tri-specific antibody construct does not bind to the third binding domain target antigen (e.g., CD3) when in circulation. This also allows for reduced dosing frequency and promotes tissue penetration by diffusion driven by concentration gradient.

[0553] The properties of the precursor tri-specific antibody construct of the present disclosure also allow the potential for the subcutaneous administration, which can enhance access to the target. Further, although in certain embodiments the precursor tri-specific antibody construct are permissive for cross-linking without protease treatment, in certain embodiments, the binding activity and the tumor killing potency increase dramatically after protease treatment.

[0554] In one embodiment, the third binding domain antigen binding domain formed by VH and VL is stabilized by the CH1 and CL heterodimerizing domain, and is further stabilized by the disulfide bond, or other stabilizing interaction (e.g., knobs/hole interaction), between CH1 and CL.

[0555] In some embodiments, the third binding domain in the precursor tri-specific antibody construct is specifically blocked by the CAP regulatory domain at its N-terminus, such that binding to the third binding domain target antigen (especially when cell surface target antigens are concerned) is specifically reduced or inhibited in a statistically significant manner (i.e., relative to an appropriate control as will be known to those skilled in the art; e.g., as compared to the same third binding domain in a format without a regulatory domain comprising a CAP component, at its N-termini (either VH and VL)). In a further embodiment, the third binding domain in the precursor tri-specific antibody construct is specifically blocked so that binding to the desirable antigen (especially when cell surface target antigens are concerned) is reduced by at least 2 fold, 3 fold, 4 fold, 5 fold, 6 fold, 7 fold, 8 fold, 9 fold, 10 fold, 11 fold, 12 fold, 13 fold, 14 fold, 15 fold, 20 fold, 30 fold, or 100 fold, or 1000 fold, or 10,000 fold as compared to the same third binding domain in a format without a regulatory domain comprising a CAP component at its N-terminus (either VH and VL).

[0556] In certain embodiments, the affinity of the third binding domain to T cells or NK cells in the precursor construct is below 500 nM. In further embodiments, the affinity of the third binding domain of the precursor construct demonstrates no significant detectible binding as measured using FACS or other binding measurement method (e.g., cell binding ELISA) at concentration ranges of the therapeutics used in humans. In one embodiment, less than 1% of a population of target T or NK cells will be bound by the third binding domain of a precursor construct at a therapeutic concentration (this is in the absence of a tumor cell microenvironment). In one embodiment, less than 5% population of the target cells will be bound by the precursor tri-specific antibody construct at a therapeutic concentration. In yet another embodiment, less than 10% population of the target cells will be bound by the precursor tri-specific antibody construct at a therapeutic concentration.

[0557] The elevated level of proteases, especially MMPs, present in tumor tissues (tumor microenvironment) will generate cleavage products at the MMP substrate cleavage site of a protease cleavable linker. Because the cleavage of the protease substrate sequence of a linker results in the release of a CAP component that may be bound at the third binding domain antigen-binding region, the binding to the third binding domain cell surface target will be fully restored or at least partially restored. The restored binding can be demonstrated using techniques of FACS, cell-based ELISA) or other cell binding techniques known to the skilled person.

[0558] A skilled artisan would appreciate that the term “dramatically reduced affinity” may encompass at least 30% reduction in the binding of the third binding domain antigen-binding domain, as compared to the binding in the absence of a CAP component of a regulatory domain present at the N-terminus of the third binding domain. The percentage of reduction can be, for example without limitation, 30%, about 40%, about 50%, about 60%, about 70%, about 80%, about 90%, or about 99% or greater. Methods for detecting binding are known to the skilled person and can be performed using FACS, cell binding ELISA or cell binding using radio-isotype labeled antibodies.

[0559] An embodiment of a third binding domain for use in the precursor tri-specific antibody construct of the present disclosure as described herein binds to a T cell or NK cell surface antigen. In this regard, the precursor tri-specific antibody construct functions such that, when the anti-TAA first binding domain binds to a tumor associated antigen, the precursor construct is present within a tumor microenvironment comprising proteases, wherein the cleavable regulatory domains are cleaved releasing a CAP component such that the third binding domain is now able to bind to T or NK cells, thereby redirecting the T or NK cells and activating them to kill the tumor cell or tumor associate cell. (FIG. 1) In another embodiment, an activated tri-specific antibody construct (also referred to herein as activated tri-specific antibody construct where the third binding domain fragment binds to T or NK cells) can exhibit an avidity effect when clustered on tumor cell surface via TAA (e.g., tumor antigen) binding by the first binding domain. As such, the apparent binding to immune cells by the third binding domain can increase due to avidity. As such, an activated tri-specific antibody construct becomes capable of bridging immune and tumor cells thereby mediating anti-tumor activity. Additionally, an activated Tri-specific antibody construct may have improved tumor penetration compared with the precursor construct, due to decreased size.

[0560] In certain embodiments, a precursor tri-specific antibody construct is separately bound to a TAA, and not bound to a T cell or NK cell, and thus the T-cells or NK cells will not be activated. In some embodiments, this lack of binding to immune cells may be a result of the TAA(s) present on a non-tumor cell. In some embodiments, this lack of binding to immune cells may be the results of the TAA(s) present on a cell in a non-tumor microenvironment. As such, the precursor construct bound to a TAA(s) in a non-tumor environment and in certain embodiments, can therefore not be activated (i.e., there will be no cleavage of the regulatable domain comprising the CAP or a portion thereof). This avoids significant side effects and tissue damage that may occur were the precursor construct to activate T or NK cells in a non-tumor cell environment. However, within a tumor microenvironment, when the T or NK cells and tumor surface antigen are simultaneously bound to the activated tri-specific antibody construct and when multiple copies of the bound complexes are anchored and clustered on tumor cell surface, the T or NK cells are activated in the vicinity of cancer cells bearing the tumor surface antigen, and therefore significantly enhance the tumor killing efficiency of T or NK cells locally and avoid the side effects due to cytokine storm.

[0561] In certain embodiments, the combination of a third binding domain targeting T or NK cells and a first binding domain targeting a cell surface tumor associated antigen comprised within a precursor construct, which is temporally regulated by a half-life enhancing regulatory domain and activity regulated by a CAP regulatory domain, the combination of which provide for enhanced tumor killing effects by T or NK cells once the precursor construct has been located to a tumor microenvironment. In certain embodiments, the combination of the third binding domain antigen target and the first binding domain antigen target can be FcyR and TAA, respectively, which combination can induce FcγR-expressing immune cells to kill tumor cells once the precursor construct has been located to a tumor microenvironment. In certain embodiments, the combination of the third binding domain antigen target and the first and second binding domain antigen targets can be CD3ε, a TAA and NKG2D, respectively, which combination can activate T cells and induce natural killer (NK) cell to kill tumor cells, once the precursor construct has been located to a tumor microenvironment. In another embodiment, the third binding domain may bind to a NK cell, the first binding domain may bind to a TAA, and the second binding domain binds to another NK cell surface antigen. In another embodiment, the third binding domain may bind to a NK cell, the first binding domain may bind to a TAA, and the second binding domain comprises a cytokine receptor engager as described herein.

[0562] Thus, in some embodiments, the precursor tri-specific antibody construct of the present disclosure comprises a third binding domain that binds to T cells or NK cells, e.g. the TCR or a component thereof, such as a CD3 polypeptide. As noted above, the precursor tri-specific antibody construct of the present disclosure does not bind to the third binding domain target antigen except following a linker cleavage event, wherein a CAP component is release or in the absence of a CAP component comprised within the precursor construct.

[0563] Thus, in certain embodiments, a precursor tri-specific antibody construct of the present disclosure does not activate T-cells or NK cells in the absence of target antigen engagement at the third binding domain. A precursor tri-specific antibody construct “does not or minimally or nominally activates T or NK cells” if the precursor tri-specific antibody construct does not cause a statistically significant increase in the percentage of activated T or NK cells as compared to activation of such immune cells in the presence of cells expressing TAA recognized by the first binding domain (e.g., an appropriate tumor cell/cell line; tumor micro-environment), as measured in at least one in vitro or in vivo assay. Such assays are known in the art and include, without limitation, proliferation assays, CTL chromium release assays (see e.g., Lavie et al., (2000) International Immunology 12(4):479-486), ELISPOT assays, intracellular cytokine staining assays, and others as described, for example, in Current Protocols in Immunology, John Wiley & Sons, New York, N.Y. (2009). In certain embodiments, T-cell activation is measured using an in vitro primed T-cell activation assay.

[0564] In a related aspect, therefore, the present disclosure provides a method for detecting T or NK cell activation induced by an activated precursor tri-specific antibody construct that comprises a first binding domain that specifically binds to a TAA, a third binding domain that specifically binds to T or NK cells, and two sub-regulatory domains, wherein the precursor construct is activated in the presence of a tumor microenvironment. In some embodiments, activation of a precursor construct comprises cleavage of a both regulatory domains. In some embodiments, activation of a precursor construct comprises cleavage of one sub-regulatory domain. In some embodiments, activation of a precursor construct comprises cleavage of a complete regulatory domain comprising a CAP component. In some embodiments, activation of a precursor construct comprises cleavage of a portion of a regulatory domain, wherein the portion of the regulatory domain comprises a CAP component. In some embodiments, activation of a precursor construct comprises cleavage of a complete regulatory domain comprising a HLP component. In some embodiments, activation of a precursor construct comprises cleavage of a portion of a regulatory domain, wherein the portion of the regulatory domain comprises a HLP component. In some embodiments, activation of a precursor construct comprises cleavage of both sub-regulatory domains, one comprising a CAP component and the other comprising an HSA component.

[0565] In some embodiments, a method for detecting T cell activation comprises (a) providing antigen or mitogen-primed T cells, (b) treating the primed T cells of step (a) with the precursor tri-specific antibody construct that comprises a third binding domain that specifically binds to a TCR complex or a component thereof (following exposure to a tumor microenvironment and cleavage of a regulatory CAP domain or a portion thereof), and (c) detecting activation of the primed T cells that have been treated in step (b).

[0566] The term “mitogen” as used herein refers to a chemical substance that induces mitosis in lymphocytes of different specificities or clonal origins. Exemplary mitogens that may be used to prime T-cells include phytohaemagglutinin (PHA), concanavalin A (ConA), lipopolysaccharide (LPS), pokeweed mitogen (PWM), and phorbol myristate acetate (PMA). Antigen-loaded beads or PBMC can also be used to prime T-cells.

[0567] In certain embodiments of methods for detecting T-cell activation provided herein, the precursor tri-specific antibody construct comprising a third binding domain that specifically binds to a TCR complex or a component thereof comprises a first and a second binding domain that bind to tumor associated antigens and a NK surface antigen, and two sub-regulatory domains, wherein one provides enhanced half-life prolonging properties, and the second provide reduction in T-cell binding properties, reduction in T-cell activation properties, or any combination thereof. In certain embodiments, methods for detecting T-cell activation provided herein, are performed in tumor and non-tumor microenvironments.

[0568] T-cell activation may be detected by measuring the expression of activation markers known in the art, such as CD25, CD40 ligand, and CD69. Activated T-cells may also be detected by cell proliferation assays, such as CFSE labeling and thymidine uptake assays (Adams (1969) Exp. Cell Res. 56:55). T-cell effector function (e.g., cell killing) can be measured, for example, by chromium release assays or FACS based assays using fluorescent dyes (e.g. TP3). In a related aspect, T-cell activation and cytolytic activity can be measured by lytic synapse formation between T-cell and tumor cell. Effector molecules such as Granzymes and porforin can be detected in the cytolytic synapse.

[0569] In another related aspect, T-cell activation may be measured by cytokine release. A method for detecting cytokine release induced by a precursor tri-specific antibody construct that comprises a third binding domain that specifically binds to a TCR complex or a component thereof, may comprise: (a) providing primed T-cells, (b) treating the primed T-cells of step (a) with the precursor tri-specific antibody construct that comprises a third binding domain that specifically binds to a TCR complex or a component thereof, (c) incubating the precursor construct in a tumor microenvironment e.g., with tumor cells associated with the antigen target of the anti-TAA first binding domain, and (d) detecting release of a cytokine from the primed T-cells that have been treated in step (b). In some embodiments, experiments are carried out in the presence or absence of appropriate cancer cells or cell lines expressing target tumor antigens bound by binding domains present in the first binding domain of the precursor tri-specific antibody construct (step c).

[0570] In certain embodiments of methods for detecting cytokine release provided herein, the precursor tri-specific antibody construct that comprises a third binding domain that specifically binds to a TCR complex or a component thereof is performed in the presence or absence of appropriate cancer cells or cell lines expressing target tumor antigens bound by binding domains present in the first binding domain of the precursor tri-specific antibody construct

[0571] In some embodiment, the precursor tri-specific antibody construct disclosed herein that contains at least one binding domain to NK cells can be used to activate NK cells, and NK cell activation can be measured by experiments similar to the ones described above. In some embodiments, the precursor tri-specific antibody construct disclosed herein that contains an IL-15 polypeptide can be used to activate NK cells, and NK cell activation and proliferation can be measured by experiments similar to the ones described above. In general, NK cell activation can be measured by cytolytic activity or degranulation assay. Such assays are known in the art and include, without limitation, chromium release assays, ELISPOT assays, intracellular cytokine staining assays, and others as described, for example, in Current Protocols in Immunology, John Wiley & Sons, New York, N.Y. (2009).

[0572] In some embodiments, the precursor tri-specific antibody construct disclosed herein that contains an IL-15 polypeptide can be used to increase proliferation of NK cells, and NK cell proliferation can be measured by experimental methods known in the art, for example but not limited to methods as provided in J. Immunol. 2015, 195:4810-4821. In some embodiments, the precursor tri-specific antibody construct disclosed herein that contains an IL-15 polypeptide can be used to increase cytotoxicity of NK cells, and NK cell cytotoxicity can be measured by experimental methods known in the art, for example but not limited to methods as provided in J. Immunol. 2015, 195:4810-4821.

[0573] In certain embodiments, the precursor tri-specific antibody construct of the present disclosure does not induce a cytokine storm or does not induce a cytokine release sufficient to induce toxic side-effects. A precursor tri-specific antibody construct “does not induce a cytokine storm” (also referred to as “inducing an undetectable, nominal, or minimal cytokine release” or “does not induce or induces a minimally detectable cytokine release”) if, in the absence of TAA target cells or appropriate linker cleavage agents (such as proteases), it does not cause a statistically significant increase in the amount of at least one cytokine including IFNγ.; In certain embodiments at least two cytokines including IFNγ and TNFα or IL-6 and TNFα.; in one embodiment three cytokines including IL-6, IFNγ and TNFα; in another embodiment four cytokines including IL-2, IL-6, IFNγ, and TNFα; and in yet a further embodiment at least five cytokines including IL-2, IL-6, IL-10,, IFNγ, and TNFα; released from treated cells in the absence of TAA target cells (e.g., an appropriate cancer cell line) or appropriate linker cleavage agents, as compared to from treated cells in the presence of appropriate TAA target cells or linker cleavage agents, in at least one in vitro or in vivo assay known in the art or provided herein. Clinically, cytokine-release syndrome is characterized by fever, chills, rash, nausea, and sometimes dyspnea and tachycardia, which is in parallel with maximal release of certain cytokines, such as IFNγ, as well as IL-2, IL-6, and TNFα. Cytokines that may be tested for release in an in vitro assay or in vivo include G-CSF, GM-CSF, IL-2, IL-4, IL-5, IL-6, IL-10, IL-13, IL-17, IP-10, KC, MCP1, IFNγ, and TNFα; and in another embodiment include IL-2, IL-6, IL-10, IFNγ, and TNFα.

[0574] In further embodiments, a precursor tri-specific antibody construct of the present disclosure causes an increase in calcium flux in cells, such as immune cells. A precursor tri-specific antibody construct causes an “increase in calcium” if, when used to activate immune cells in the presence of an appropriate TAA target cell (e.g., cancer cell) or linker cleavage agents, it causes a statistically significant, rapid increase in calcium flux of the treated cells (within 300 seconds, or within 200 seconds, or within 100 seconds of treatment) as compared to cells treated in the absence of an appropriate TAA target cell or linker cleavage agents, as measured in an in vitro assay known in the art or provided herein.

[0575] In further embodiments, a precursor tri-specific antibody construct of the present disclosure induces phosphorylation of a molecule in the TCR signal transduction pathway. The “TCR signal transduction pathway” refers to the signal transduction pathway initiated via the binding of a peptide:MHC ligand to the TCR and its co-receptor (CD4 or CD8). A “molecule in the TCR signal transduction pathway” refers to a molecule that is directly involved in the TCR signal transduction pathway, such as a molecule whose phosphorylation state (e.g., whether the molecule is phosphorylated or not), whose binding affinity to another molecule, or whose enzymatic activity, has been changed in response to the signal from the binding of a peptide:MHC ligand to the TCR and its co-receptor. Exemplary molecules in the TCR signal transduction pathway include the TCR complex or its components (e.g., CD3 chains), ZAP-70, Fyn, Lck, phospholipase c-γ, protein kinase C, transcription factor NFκB, phosphatase calcineurin, transcription factor NFAT, guanine nucleotide exchange factor (GEF), Ras, MAP kinase kinase kinase (MAPKKK), MAP kinase kinase (MAPKK), MAP kinase (ERK½), and Fos.

[0576] A precursor tri-specific antibody construct of this disclosure “induces phosphorylation of a molecule in the TCR signal transduction pathway” if it causes a statistically significant increase in phosphorylation of a molecule in the TCR signal transduction pathway (e.g., CD3 chains, ZAP-70, and ERK½) only in the presence of cells expressing TAA antigen (e.g., cancer cells expressing tumor antigens bound by a first binding domains, or when the TAA is present on a non-tumor cell, tumor cells expressing proteases able to cleave the protease cleavable domain of a regulatory domain are present) or linker cleavage agents, in an in vitro or in vivo assay or receptor signaling assays known in the art. Results from most receptor signaling assays known in the art are determined using immunohistochemical methods, such as western blots or fluorescence microscopy.

[0577] Similarly, an activated precursor tri-specific antibody construct of the present disclosure may induce killing of TAA target cell, such as tumor cells or vascular cells which support the growth and maintenance of tumor cells, by T-cells and/or NK cells following exposure to a tumor cell microenvironment or exposure to a protease or proteases able to cleave the protease cleavable component of a regulatory domain(s). Such cell killing can be measured using a variety of assays known in the art, including chromium release assays.

[0578] The specificity and function of a precursor tri-specific antibody construct of the present disclosure may be tested by contacting the precursor tri-specific antibody construct with appropriate test sample and, in certain embodiments, treating the precursor tri-specific antibody construct with an appropriate protease which is thought to be specific for the cleavage recognition site in the linker and assaying for cleavage products. Proteases may be isolated, for example from cancer cells or they may be prepared recombinantly, for example following the procedures in Darket et al. (J. Biol. Chem. 254:2307-2312 (1988)). The cleavage products may be identified for example based on size, antigenicity or activity. The toxicity of the precursor tri-specific antibody construct may be investigated by subjecting the precursor tri-specific antibody construct and cleavage products thereof to in vitro cytotoxicity, proliferation, binding, or other appropriate assays known to the skilled person. Toxicity of the cleavage products may be determined using a ribosomal inactivation assay (Westby et al., Bioconjugate Chem. 3:377-382 (1992)). The effect of the cleavage products on protein synthesis may be measured in standardized assays of in vitro translation utilizing partially defined cell free systems composed for example of a reticulocyte lysate preparation as a source of ribosomes and various essential cofactors, such as mRNA template and amino acids. Use of radiolabeled amino acids in the mixture allows quantitation of incorporation of free amino acid precursors into trichloroacetic acid precipitable proteins. Rabbit reticulocyte lysates may be conveniently used (O′Hare, FEBS Lett. 273:200-204 (1990)).

[0579] The ability of an activated precursor tri-specific antibody construct as disclosed herein, to destroy cancer cells and/or activate T-cells and/or NK cells may be readily tested in vitro using cancer cell lines, T or NK cells or isolated PBMC. The effects of the precursor tri-specific antibody construct of the present disclosure may be determined, for example, by demonstrating by selective lysis of cancer cells. In addition, the protease specificity can be tested by comparing the inhibition of cellular proliferation using a precursor bispecific antibody construct of the present disclosure alone or in the presence of protease-specific inhibitors. Such protease inhibitors may include MMP-2/MMP-9 inhibitors GM1489, GM6001 and GI-I to GI-IV.

[0580] Toxicity may also be measured based on cell viability, for example the viability of normal and cancerous cell cultures exposed to the precursor tri-specific antibody construct may be compared. Cell viability may be assessed by known techniques, such as trypan blue exclusion assays. Toxicity may also be measured based on cell lysis, for example the lysis of normal and cancerous cell cultures exposed to the precursor bispecific antibody construct may be compared. Cell lysis may be assessed by known techniques, such as Chromium (Cr) release assays or dead cell indicator dyes (propidium Iodide, TO-PRO-3 Iodide).

### Precursor Bispecific Antibody Construct Components

[0581] The present disclosure provides precursor tri-specific antibody construct polypeptides comprising various components as described herein. As described in detail above, in some embodiments a precursor tri-specific antibody construct comprises two polypeptides: polypeptide A and polypeptide B, each comprising various binding domains and regulatory components disclosed herein. The present disclosure has disclosed various examples of VH and VL for anti-T cell, anti-NK cell, or anti-TAA Fab or scFv; sequences for linkers; and sequences for various regulatory domains. In view of the disclosure provided herein, one of ordinary skill in the art would readily combine these various components into the precursor tri-specific antibody construct polypeptides described herein.

[0582] A skilled artisan would appreciate that terms “polypeptide” “protein” and “peptide” and “glycoprotein” are used interchangeably and encompass a polymer of amino acids not limited to any particular length. The term does not exclude modifications such as myristylation, sulfation, glycosylation, phosphorylation and addition or deletion of signal sequences. The terms “polypeptide” or “protein” may encompass one or more chains of amino acids, wherein each chain comprises amino acids covalently linked by peptide bonds, and wherein said polypeptide or protein can comprise a plurality of chains non-covalently and/or covalently linked together by peptide bonds, having the sequence of native proteins, that is, proteins produced by naturally-occurring and specifically non-recombinant cells, or genetically-engineered or recombinant cells, and comprise molecules having the amino acid sequence of the native protein, or molecules having deletions from, additions to, and/or substitutions of one or more amino acids of the native sequence. The terms “polypeptide” and “protein” may encompass a polypeptide A or a polypeptide B of a precursor tri-specific antibody construct and heterodimers thereof of the present disclosure, or sequences that have deletions from, additions to, and/or substitutions of one or more amino acid of a precursor bispecific antibody construct as disclosed herein. Thus, a “polypeptide” or a “protein” can comprise one (termed “a monomer”) or a plurality (termed “a multimer”) of amino acid chains.

[0583] The term “isolated protein” referred to herein encompasses a subject protein (1) is free of at least some other proteins with which it would typically be found in nature, (2) is essentially free of other proteins from the same source, e.g., from the same species, (3) is expressed by a cell from a different species, (4) has been separated from at least about 50 percent of polynucleotides, lipids, carbohydrates, or other materials with which it is associated in nature, (5) is not associated (by covalent or noncovalent interaction) with portions of a protein with which the “isolated protein” is associated in nature, (6) is operably associated (by covalent or noncovalent interaction) with a polypeptide with which it is not associated in nature, or (7) does not occur in nature. Such an isolated protein can be encoded by genomic DNA, cDNA, mRNA or other RNA, of may be of synthetic origin, or any combination thereof. In certain embodiments, the isolated protein is substantially free from proteins or polypeptides or other contaminants that are found in its natural environment that would interfere with its use (therapeutic, diagnostic, prophylactic, research or otherwise).

[0584] The term “polypeptide fragment” encompasses a polypeptide, which can be monomeric or multimeric, that has an amino-terminal deletion, a carboxyl-terminal deletion, and/or an internal deletion or substitution of a naturally-occurring or recombinantly-produced polypeptide. In certain embodiments, a polypeptide fragment can comprise an amino acid chain at least 5 to about 500 amino acids long. It will be appreciated that in certain embodiments, fragments are at least 5, 6, 7, 8, 9, 10, 11, 12, 13, 14, 15, 16, 17, 18, 19, 20, 21, 22, 23, 24, 25, 26, 27, 28, 29, 30, 31, 32, 33, 34, 35, 36, 37, 38, 39, 40, 41, 42, 43, 44, 45, 46, 47, 48, 49, 50, 55, 60, 65, 70, 75, 80, 85, 90, 95, 100, 110, 150, 200, 250, 300, 350, 400, or 450 amino acids long. Particularly useful polypeptide fragments include functional domains, including antigen-binding domains or fragments of antibodies. In the case of an anti-CD3, or other antibody, useful fragments include, but are not limited to: a CDR region, especially a CDR3 region of the heavy or light chain; a variable region of a heavy or light chain; a portion of an antibody chain or just its variable region including two CDRs; and the like.

[0585] Polypeptides may comprise a signal (or leader) sequence at the N-terminal end of the protein, which co-translationally or post-translationally directs transfer of the protein. The polypeptide may also be fused in-frame or conjugated to a linker or other sequence for ease of synthesis, purification or identification of the polypeptide (e.g., poly-His), or to enhance binding of the polypeptide to a solid support.

[0586] Amino acid sequence modification(s) of the precursor tri-specific antibody constructs described herein are contemplated. For example, it may be desirable to improve the binding affinity and/or other biological properties of the precursor tri-specific antibody construct. For example, amino acid sequence variants of a linker sequence, or a binding domain, or a regulatory component(s) thereof may be prepared by introducing appropriate nucleotide changes into a polynucleotide that encodes the precursor tri-specific antibody construct polypeptides, or a domain thereof, or by peptide synthesis. Such modifications include, for example, deletions from, and/or insertions into and/or substitutions of, residues within the amino acid sequences of the precursor tri-specific antibody construct polypeptides. Any combination of deletion, insertion, and substitution may be made to arrive at the final precursor tri-specific antibody construct polypeptides, provided that the final construct possesses the desired characteristics, such as specific binding to a target antigen of interest by a first or second binding domain or both, or a third binding domain, or enhanced half-life by an HSA polypeptide comprised in a regulatory domain, or specific binding to a third binding domain by a regulatory domain comprising a CAP component, or protease cleavage by a protease cleavage domain(s) (linker). The amino acid changes also may alter post-translational processes of the precursor tri-specific antibody construct polypeptides, such as changing the number or position of glycosylation sites. Any of the variations and modifications described above for polypeptides as disclosed herein, may be included in precursor tri-specific antibody constructs presented herein.

[0587] The present disclosure provides variants of the precursor tri-specific antibody construct polypeptides disclosed herein. In certain embodiments, such variant precursor tri-specific antibody construct polypeptides comprise variant binding domains or fragments thereof, or antigen-binding fragments, or TAA binding fragments, or NK binding fragments, or CDRs of binding domains, bind to a target of interest at least about 50%, at least about 70%, and in certain embodiments, at least about 90% as well as a given reference or wild-type sequence, including any such sequences specifically set forth herein. In further embodiments, such variants bind to a target antigen with greater affinity the reference or wild-type sequence set forth herein, for example, that bind quantitatively at least about 105%, 106%, 107%, 108%, 109%, or 110% as well as a reference sequence specifically set forth herein. In certain embodiments, such variant precursor tri-specific antibody construct polypeptides comprise variant regulatory domains or fragments thereof, or HSA components, or CAP components or fragments thereof, wherein said variant has at least about 50%, at least about 70%, and in certain embodiments, at least about 90% of the activity of a reference or wild-type regulatory domain or component, including any such sequences specifically set forth herein.

[0588] In certain embodiments, the present disclosure provides variants of the precursor tri-specific antibody constructs or polypeptides thereof, disclosed herein where such variants comprise third binding domains that have been modified with regard to the disulfide bond between the VH and VL chains. As would be recognized by the skilled person, in certain embodiments the third binding domain, which in some embodiments comprises a Fab fragment, used in the precursor tri-specific antibody construct described herein may not comprise a disulfide bond. In this regard, the heavy and light chains may be engineered in such a way so as to stably interact without the need for disulfide bond. For example, in certain embodiments, the heavy or light chain can be engineered to remove a cysteine residue and wherein the heavy and light chains still stably interact and function as a binding domain e.g. a Fab fragment. In some embodiments, mutations are made to facilitate stable interaction between the heavy and light chains. For example, a “knobs into holes” engineering strategy can be used to facilitate dimerization between the heavy and light chains of a Fab second binding domain (see e.g., 1996 Protein Engineering, 9:617-621). Thus, also contemplated for use herein are variant amino acid sequences of the third binding domain (e.g., Fab fragments) designed for a particular purpose, for example, removal of a disulfide bond addition of tax for purification, etc.

[0589] In particular embodiments, a subject precursor tri-specific antibody construct polypeptide may have: an amino acid sequence that is at least 80% identical, at least 95% identical, at least 90%, at least 95% or at least 98% or 99% identical, to the VH and VL portions of the precursor tri-specific antibody construct polypeptides described herein.

[0590] Determination of the three-dimensional structures of representative polypeptides may be made through routine methodologies such that substitution, addition, deletion or insertion of one or more amino acids with selected natural or non-natural amino acids can be virtually modeled for purposes of determining whether a so derived structural variant retains the space-filling properties of presently disclosed species. See, for instance, Donate et al., 1994 Prot. Sci. 3:2378; Bradley et al., Science 309: 1868-1871 (2005); Schueler-Furman et al., Science 310:638 (2005); Dietz et al., Proc. Nat. Acad. Sci. USA 103:1244 (2006); Dodson et al., Nature 450:176 (2007); Qian et al., Nature 450:259 (2007); Raman et al. Science 327:1014-1018 (2010). Some additional non-limiting examples of computer algorithms that may be used for these and related embodiments, include VMD which is a molecular visualization program for displaying, animating, and analyzing large biomolecular systems using 3-D graphics and built-in scripting (see the website for the Theoretical and Computational Biophysics Group, University of Illinois at Urbana-Champagne, at ks.uiuc.edu/Research/vmd/). Many other computer programs are known in the art and available to the skilled person and which allow for determining atomic dimensions from space-filling models (van der Waals radii) of energy-minimized conformations; GRID, which seeks to determine regions of high affinity for different chemical groups, thereby enhancing binding, Monte Carlo searches, which calculate mathematical alignment, and CHARMM (Brooks et al. (1983) J. Comput. Chem. 4:187-217) and AMBER (Weiner et al (1981) J. Comput. Chem. 106: 765), which assess force field calculations, and analysis (see also, Eisenfield et al. (1991) Am. J. Physiol. 261:C376-386; Lybrand (1991) J. Pharm. Belg. 46:49-54; Froimowitz (1990) Biotechniques 8:640-644; Burbam et al. (1990) Proteins 7:99-111; Pedersen (1985) Environ. Health Perspect. 61:185-190; and Kini et al. (1991) J. Biomol. Struct. Dyn. 9:475-488). A variety of appropriate computational computer programs are also commercially available, such as from Schrodinger (Munich, Germany).

### Polynucleotides Encoding Precursor Bispecific Antibody Construct Components, Vectors, Host Cells, and Methods of Producing Precursor Bispecific Antibody Constructs

[0591] The present disclosure further provides in certain embodiments an isolated nucleic acid encoding the polypeptide precursor tri-specific antibody construct as described herein. Illustrative polynucleotides and fragments thereof, are provided in Table 3 below. Nucleic acids include DNA and RNA. These and related embodiments may include polynucleotides encoding the precursor tri-specific antibody construct as described herein. The term “isolated polynucleotide” as used herein shall mean a polynucleotide of genomic, cDNA, or synthetic origin or some combination thereof, which by virtue of its origin the isolated polynucleotide (1) is not associated with all or a portion of a polynucleotide in which the isolated polynucleotide is found in nature, (2) is linked to a polynucleotide to which it is not linked in nature, or (3) does not occur in nature as part of a larger sequence.

[0592] A skilled artisan would appreciate that the terms “polynucleotide” and “nucleic acid sequence” may in some embodiments be used interchangeably having all the same meanings and qualities.

[0593] In some embodiments, isolated nucleic acid sequences encode a polypeptide A and a polypeptide B of a precursor tri-specific antibody construct as disclosed herein throughout in detail. In some embodiments, an isolated nucleic acid sequences encodes polypeptide A of a precursor tri-specific antibody construct, as described above in detail. In some embodiments, an isolated nucleic acid sequences encodes polypeptide B of a precursor tri-specific antibody construct, as described above in detail. In some embodiments, polypeptides A and B form a heterodimer comprising a precursor construct as described in detail above..

TABLE 3

Nucleotide Sequences of Encoding Anti-CD3 VH, VL, HC, LC, Anti-EGFR, Regulatory components, and Combinations thereof (See also nucleotide sequences in Example 1 below

| SEQ ID No | Description |
|---|---|
| 155 | Anti-CD3 epsilon VH-CH1 |
| 159 | Anti-CD3epsilon VL-CL |
| 36 | Anti-EGFR VL |
| 38 | Anti-EGFR VH |
| 43 | Anti-EGFR VL-L-VH |
| 44 | Anti-EGFR VH-L-VL |
| 8 | HSA |
| 164 | CAP |
| 33 | MMP Cleavable Sequence |

[0594] The term “operably linked” encompasses components to which the term is applied are in a relationship that allows them to carry out their inherent functions under suitable conditions. For example, a transcription control sequence “operably linked” to a protein coding sequence is ligated thereto so that expression of the protein coding sequence is achieved under conditions compatible with the transcriptional activity of the control sequences.

[0595] The term “control sequence” as used herein encompasses polynucleotide sequences that can affect expression, processing or intracellular localization of coding sequences to which they are ligated or operably linked. The nature of such control sequences may depend upon the host organism. In particular embodiments, transcription control sequences for prokaryotes may include a promoter, ribosomal binding site, and transcription termination sequence. In other particular embodiments, transcription control sequences for eukaryotes may include promoters comprising one or a plurality of recognition sites for transcription factors, transcription enhancer sequences, transcription termination sequences and polyadenylation sequences. In certain embodiments, “control sequences” can include leader sequences and/or fusion partner sequences.

[0596] The term “polynucleotide” as used herein encompasses single-stranded or double-stranded nucleic acid polymers. In certain embodiments, the nucleotides comprising the polynucleotide can be ribonucleotides or deoxyribonucleotides or a modified form of either type of nucleotide. Said modifications include base modifications such as bromouridine, ribose modifications such as arabinoside and 2′,3′-dideoxyribose and internucleotide linkage modifications such as phosphorothioate, phosphorodithioate, phosphoroselenoate, phosphorodiselenoate, phosphoroanilothioate, phoshoraniladate and phosphoroamidate. The term “polynucleotide” specifically includes single and double stranded forms of DNA.

[0597] The term “naturally occurring nucleotides” includes deoxyribonucleotides and ribonucleotides. The term “modified nucleotides” includes nucleotides with modified or substituted sugar groups and the like. The term “oligonucleotide linkages” includes oligonucleotide linkages such as phosphorothioate, phosphorodithioate, phosphoroselenoate, phosphorodiselenoate, phosphoroanilothioate, phoshoraniladate, phosphoroamidate, and the like. See, e.g., LaPlanche et al., 1986, Nucl. Acids Res., 14:9081; Stec et al., 1984, J. Am. Chem. Soc., 106:6077; Stein et al., 1988, Nucl. Acids Res., 16:3209; Zon et al., 1991, AntiCancer Drug Design, 6:539; Zon et al., 1991, OLIGONUCLEOTIDES AND ANALOGUES: A PRACTICAL APPROACH, pp. 87-108 (F. Eckstein, Ed.), Oxford University Press, Oxford England; Stec et al., U.S. Pat. No. 5,151,510; Uhlmann and Peyman, 1990, Chemical Reviews, 90:543, the disclosures of which are hereby incorporated by reference for any purpose. An oligonucleotide can include a detectable label to enable detection of the oligonucleotide or hybridization thereof.

[0598] In other related embodiments, polynucleotide variants may have substantial identity to a polynucleotide sequence encoding a precursor tri-specific antibody construct, or domain thereof as described herein. For example, a polynucleotide may be a polynucleotide comprising at least 70% sequence identity, preferably at least 75%, 80%, 85%, 90%, 95%, 96%, 97%, 98%, or 99% or higher, sequence identity compared to a reference polynucleotide sequence such as a sequence encoding a precursor bispecific antibody construct or domain thereof described herein, using the methods described herein, (e.g., BLAST analysis using standard parameters, as described below). One skilled in this art will recognize that these values can be appropriately adjusted to determine corresponding identity of proteins encoded by two nucleotide sequences by taking into account codon degeneracy, amino acid similarity, reading frame positioning and the like.

[0599] Typically, polynucleotide variants will contain one or more substitutions, additions, deletions and/or insertions, preferably such that the binding affinity of a binding domain, or binding affinity of a first or second or a third binding domain, or function of the precursor tri-specific antibody construct polypeptide encoded by the variant polynucleotide is not substantially diminished relative to the unmodified reference protein encoded by a polynucleotide sequence specifically set forth herein.

[0600] In certain other related embodiments, polynucleotide fragments may comprise or consist essentially of various lengths of contiguous stretches of sequence identical to or complementary to a sequence encoding a precursor tri-specific antibody construct polypeptide or domain thereof as described herein. For example, polynucleotides are provided that comprise or consist essentially of at least about 5, 6, 7, 8, 9, 10, 11, 12, 13, 14, 15, 16, 17, 18, 19, 20, 21, 22, 23, 24, 25, 26, 27, 28, 29, 30, 31, 32, 33, 34, 35, 36, 37, 38, 39, 40, 45, 50, 55, 60, 65, 70, 75, 80, 85, 90, 95, 100, 110, 120, 130, 140, 150, 200, 300, 400, 500 or 1000 or more contiguous nucleotides of a sequences the encodes a precursor tri-specific antibody construct polypeptide or domain thereof, such as a first binding domain or a second binding domain or a third binding domain or a first regulatory domain or a second regulatory domain, or components thereof, disclosed herein as well as all intermediate lengths there between. It will be readily understood that “intermediate lengths”, in this context, means any length between the quoted values, such as 50, 51, 52, 53, etc.; 100, 101, 102, 103, etc.; 150, 151, 152, 153, etc.; including all integers through 200-500; 500-1,000, and the like. A polynucleotide sequence as described here may be extended at one or both ends by additional nucleotides not found in the native sequence. This additional sequence may consist of 1, 2, 3, 4, 5, 6, 7, 8, 9, 10, 11, 12, 13, 14, 15, 16, 17, 18, 19, or 20 nucleotides at either end of a polynucleotide encoding a precursor tri-specific antibody construct polypeptide or domain or component part thereof described herein or at both ends of a polynucleotide encoding a precursor tri-specific antibody construct polypeptide or domain or component part thereof described herein.

[0601] In another embodiment, polynucleotides are provided that are capable of hybridizing under moderate to high stringency conditions to a polynucleotide sequence encoding precursor tri-specific antibody construct polypeptide or domain or component part thereof, such as a first binding domain or a second binding domain or a third bindig domain or a first regulatory domain or a second regulatory domain, or component parts thereof, as provided herein, or a fragment thereof, or a complementary sequence thereof. Hybridization techniques are well known in the art of molecular biology. For purposes of illustration, suitable moderately stringent conditions for testing the hybridization of a polynucleotide as provided herein with other polynucleotides include prewashing in a solution of 5XSSC, 0.5% SDS, 1.0 mM EDTA (pH 8.0); hybridizing at 50° C.-60° C., 5XSSC, overnight; followed by washing twice at 65°. C. for 20 minutes with each of 2X, 0.5X and 0.2XSSC containing 0.1% SDS. One skilled in the art will understand that the stringency of hybridization can be readily manipulated, such as by altering the salt content of the hybridization solution and/or the temperature at which the hybridization is performed. For example, in another embodiment, suitable highly stringent hybridization conditions include those described above, with the exception that the temperature of hybridization is increased, e.g., to 60° C.-65° C. or 65° C.-70° C.

[0602] In certain embodiments, the polynucleotides described above, e.g., polynucleotide variants, fragments and hybridizing sequences, encode a precursor tri-specific antibody construct polypeptide or domain thereof or component part thereof, such as a first or a second binding domain or both, e.g., a scFv that binds to a human EGFR, or a third binding domain, e.g., a Fab fragment that binds CD3 epsilon, or a regulatory domain comprising an HSA polypeptide that extends half-life, or a regulatory domain comprising a CAP component that specifically binds to a third binding domain. In other embodiments, such polynucleotides encode precursor tri-specific antibody construct polypeptides or domains or components thereof that bind to T or NK cells and/or a tumor associated antigen at least about 50%, at least about 70%, and in certain embodiments, at least about 90% as well as a precursor tri-specific antibody construct polypeptide sequence specifically set forth herein. In other embodiments, such polynucleotides encode precursor tri-specific antibody construct polypeptides or domains or components thereof that extend the half-life of the precursor construct at least about 50%, at least about 70%, and in certain embodiments, at least about 90% as well as a precursor tri-specific antibody construct polypeptide sequence specifically set forth herein. In other embodiments, such polynucleotides encode precursor tri-specific antibody construct polypeptides or domains or components thereof that specifically bind to the third binding site of the precursor construct at least about 50%, at least about 70%, and in certain embodiments, at least about 90% as well as a precursor tri-specific antibody construct polypeptide sequence specifically set forth herein. In further embodiments, such polynucleotides encode a precursor tri-specific antibody construct polypeptide or domain thereof, that, e.g., bind to CD3 and/or a tumor associated antigen with greater affinity than the precursor tri-specific antibody construct polypeptide, or domain thereof, set forth herein, for example, that bind quantitatively at least about 105%, 106%, 107%, 108%, 109%, or 110% as well as a precursor tri-specific antibody construct polypeptide or domain thereof sequence specifically set forth herein.

[0603] The polynucleotides described herein, or fragments thereof, regardless of the length of the coding sequence itself, may be combined with other DNA sequences, such as promoters, polyadenylation signals, additional restriction enzyme sites, multiple cloning sites, other coding segments, and the like, such that their overall length may vary considerably. It is therefore contemplated that a nucleic acid fragment of almost any length may be employed, with the total length preferably being limited by the ease of preparation and use in the intended recombinant DNA protocol. For example, illustrative polynucleotide segments with total lengths of about 10,000, about 5000, about 3000, about 2,000, about 1,000, about 500, about 200, about 100, about 50 base pairs in length, and the like, (including all intermediate lengths) are contemplated to be useful.

[0604] When comparing polynucleotide sequences, two sequences are said to be “identical” if the sequence of nucleotides in the two sequences is the same when aligned for maximum correspondence, as described below. Comparisons between two sequences are typically performed by comparing the sequences over a comparison window to identify and compare local regions of sequence similarity. A “comparison window” as used herein, refers to a segment of at least about 20 contiguous positions, usually 30 to about 75, 40 to about 50, in which a sequence may be compared to a reference sequence of the same number of contiguous positions after the two sequences are optimally aligned.

[0605] Optimal alignment of sequences for comparison may be conducted using the Megalign program in the Lasergene suite of bioinformatics software (DNASTAR, Inc., Madison, Wis.), using default parameters. This program embodies several alignment schemes described in the following references: Dayhoff, M. O. (1978) A model of evolutionary change in proteins--Matrices for detecting distant relationships. In Dayhoff, M. O. (ed.) Atlas of Protein Sequence and Structure, National Biomedical Research Foundation, Washington D.C. Vol. 5, Suppl. 3, pp. 345-358; Hein J., Unified Approach to Alignment and Phylogenes, pp. 626-645 (1990); Methods in Enzymology vol. 183, Academic Press, Inc., San Diego, Calif.; Higgins, D. G. and Sharp, P. M., CABIOS 5:151-153 (1989); Myers, E. W. and Muller W., CABIOS 4:11-17 (1988); Robinson, E. D., Comb. Theor 11:105 (1971); Santou, N. Nes, M., Mol. Biol. Evol. 4:406-425 (1987); Sneath, P. H. A. and Sokal, R. R., Numerical Taxonomythe Principles and Practice of Numerical Taxonomy, Freeman Press, San Francisco, Calif. (1973); Wilbur, W. J. and Lipman, D. J., Proc. Natl. Acad., Sci. USA 80:726-730 (1983).

[0606] Alternatively, optimal alignment of sequences for comparison may be conducted by the local identity algorithm of Smith and Waterman, Add. APL. Math 2:482 (1981), by the identity alignment algorithm of Needleman and Wunsch, J. Mol. Biol. 48:443 (1970), by the search for similarity methods of Pearson and Lipman, Proc. Natl. Acad. Sci. USA 85: 2444 (1988), by computerized implementations of these algorithms (GAP, BESTFIT, BLAST, FASTA, and TFASTA in the Wisconsin Genetics Software Package, Genetics Computer Group (GCG), 575 Science Dr., Madison, Wis.), or by inspection.

[0607] One example of algorithms that are suitable for determining percent sequence identity and sequence similarity are the BLAST and BLAST 2.0 algorithms, which are described in Altschul et al., Nucl. Acids Res. 25:3389-3402 (1977), and Altschul et al., J. Mol. Biol. 215:403-410 (1990), respectively. BLAST and BLAST 2.0 can be used, for example with the parameters described herein, to determine percent sequence identity among two or more the polynucleotides. Software for performing BLAST analyses is publicly available through the National Center for Biotechnology Information. In one illustrative example, cumulative scores can be calculated using, for nucleotide sequences, the parameters M (reward score for a pair of matching residues; always >0) and N (penalty score for mismatching residues; always <0). Extension of the word hits in each direction are halted when: the cumulative alignment score falls off by the quantity X from its maximum achieved value; the cumulative score goes to zero or below, due to the accumulation of one or more negative-scoring residue alignments; or the end of either sequence is reached. The BLAST algorithm parameters W, T and X determine the sensitivity and speed of the alignment. The BLASTN program (for nucleotide sequences) uses as defaults a wordlength (W) of 11, and expectation (E) of 10, and the BLOSUM62 scoring matrix (see Henikoff and Henikoff, Proc. Natl. Acad. Sci. USA 89:10915 (1989)) alignments, (B) of 50, expectation (E) of 10, M=5, N=-4 and a comparison of both strands.

[0608] In certain embodiments, the “percentage of sequence identity” is determined by comparing two optimally aligned sequences over a window of comparison of at least 20 positions, wherein the portion of the polynucleotide sequence in the comparison window may comprise additions or deletions (i.e., gaps) of 20 percent or less, usually 5 to 15 percent, or 10 to 12 percent, as compared to the reference sequences (which does not comprise additions or deletions) for optimal alignment of the two sequences. The percentage is calculated by determining the number of positions at which the identical nucleic acid bases occurs in both sequences to yield the number of matched positions, dividing the number of matched positions by the total number of positions in the reference sequence (i.e., the window size) and multiplying the results by 100 to yield the percentage of sequence identity.

[0609] It will be appreciated by those of ordinary skill in the art that, as a result of the degeneracy of the genetic code, there are many nucleotide sequences that encode a precursor bispecific antibody construct as described herein. Some of these polynucleotides bear minimal sequence identity to the nucleotide sequence of the native or original polynucleotide sequence that encode precursor tri-specific antibody construct polypeptides or domains or components thereof, for example forming a precursor bispecific antibody construct that binds to CD3 and or a tumor associated antigen. Nonetheless, polynucleotides that vary due to differences in codon usage are expressly contemplated by the present disclosure. In certain embodiments, sequences that have been codon-optimized for mammalian expression are specifically contemplated.

[0610] Therefore, in another embodiment as disclosed herein, a mutagenesis approach, such as site-specific mutagenesis, may be employed for the preparation of variants and/or derivatives of the precursor tri-specific antibody construct polypeptides described herein. By this approach, specific modifications in a polypeptide sequence can be made through mutagenesis of the underlying polynucleotides that encode them. These techniques provide a straightforward approach to prepare and test sequence variants, for example, incorporating one or more of the foregoing considerations, by introducing one or more nucleotide sequence changes into the polynucleotide.

[0611] Site-specific mutagenesis allows the production of mutants through the use of specific oligonucleotide sequences which encode the DNA sequence of the desired mutation, as well as a sufficient number of adjacent nucleotides, to provide a primer sequence of sufficient size and sequence complexity to form a stable duplex on both sides of the deletion junction being traversed. Mutations may be employed in a selected polynucleotide sequence to improve, alter, decrease, modify, or otherwise change the properties of the polynucleotide itself, and/or alter the properties, activity, composition, stability, or primary sequence of the encoded polypeptide.

[0612] In certain embodiments, mutagenesis of the polynucleotide sequences that encode a precursor tri-specific antibody construct polypeptide or domain thereof or component part thereof, as disclosed herein, is contemplated in order to alter one or more properties of the encoded polypeptide/domain/component, such as the binding affinity of a first binding domain or a second binding domain or a third binding domain, or the function of a first or second regulatory domain or component thereof. The techniques of site-specific mutagenesis are well-known in the art and are widely used to create variants of both polypeptides and polynucleotides. For example, site-specific mutagenesis is often used to alter a specific portion of a DNA molecule. In such embodiments, a primer comprising typically about 14 to about 25 nucleotides or so in length is employed, with about 5 to about 10 residues on both sides of the junction of the sequence being altered.

[0613] As will be appreciated by those of skill in the art, site-specific mutagenesis techniques have often employed a phage vector that exists in both a single stranded and double stranded form. Typical vectors useful in site-directed mutagenesis include vectors such as the M13 phage. These phages are readily commercially-available and their use is generally well-known to those skilled in the art. Double-stranded plasmids are also routinely employed in site directed mutagenesis that eliminates the step of transferring the gene of interest from a plasmid to a phage.

[0614] In general, site-directed mutagenesis in accordance herewith is performed by first obtaining a single-stranded vector or melting apart of two strands of a double-stranded vector that includes within its sequence a DNA sequence that encodes the desired peptide. An oligonucleotide primer bearing the desired mutated sequence is prepared, generally synthetically. This primer is then annealed with the single-stranded vector and subjected to DNA polymerizing enzymes such as E. coli polymerase I Klenow fragment, in order to complete the synthesis of the mutation-bearing strand. Thus, a heteroduplex is formed wherein one strand encodes the original non-mutated sequence and the second strand bears the desired mutation. This heteroduplex vector is then used to transform appropriate cells, such as E. coli cells, and clones are selected which include recombinant vectors bearing the mutated sequence arrangement.

[0615] The preparation of sequence variants of the selected peptide-encoding DNA segments using site-directed mutagenesis provides a means of producing potentially useful species and is not meant to be limiting as there are other ways in which sequence variants of peptides and the DNA sequences encoding them may be obtained. For example, recombinant vectors encoding the desired peptide sequence may be treated with mutagenic agents, such as hydroxylamine, to obtain sequence variants. Specific details regarding these methods and protocols are found in the teachings of Maloy et al., 1994; Segal, 1976; Prokop and Bajpai, 1991; Kuby, 1994; and Maniatis et al., 1982, each incorporated herein by reference, for that purpose.

[0616] As used herein, the term “oligonucleotide directed mutagenesis procedure” encompasses template-dependent processes and vector-mediated propagation which result in an increase in the concentration of a specific nucleic acid molecule relative to its initial concentration, or in an increase in the concentration of a detectable signal, such as amplification. As used herein, the term “oligonucleotide directed mutagenesis procedure” encompasses a process that involves the template-dependent extension of a primer molecule. The term “template dependent process” encompasses nucleic acid synthesis of an RNA or a DNA molecule wherein the sequence of the newly synthesized strand of nucleic acid is dictated by the well-known rules of complementary base pairing (see, for example, Watson, 1987). Typically, vector mediated methodologies involve the introduction of the nucleic acid fragment into a DNA or RNA vector, the clonal amplification of the vector, and the recovery of the amplified nucleic acid fragment. Examples of such methodologies are provided by U.S. Pat. No. 4,237,224, specifically incorporated herein by reference in its entirety.

[0617] In another approach for the production of polypeptide variants, recursive sequence recombination, as described in U.S. Pat. No. 5,837,458, may be employed. In this approach, iterative cycles of recombination and screening or selection are performed to “evolve” individual polynucleotide variants having, for example, increased binding affinity. Certain embodiments also provide constructs in the form of plasmids, vectors, transcription or expression cassettes which comprise at least one polynucleotide as described herein.

[0618] In certain embodiments, the isolated polynucleotide is inserted into a vector. The term “vector” as used herein encompasses a vehicle into which a polynucleotide encoding a protein may be covalently inserted so as to bring about the expression of that protein and/or the cloning of the polynucleotide. The isolated polynucleotide may be inserted into a vector using any suitable methods known in the art, for example, without limitation, the vector may be digested using appropriate restriction enzymes and then may be ligated with the isolated polynucleotide having matching restriction ends.

[0619] Examples of suitable vectors include, without limitation, plasmids, phagemids, cosmids, artificial chromosomes such as yeast artificial chromosome (YAC), bacterial artificial chromosome (BAC), or P1-derived artificial chromosome (PAC), bacteriophages such as lambda phage or M13 phage, and animal viruses. Examples of categories of animal viruses useful as vectors include, without limitation, retrovirus (including lentivirus), adenovirus, adeno-associated virus, herpesvirus (e.g., herpes simplex virus), poxvirus, baculovirus, papillomavirus, and papovavirus (e.g., SV40).

[0620] For expression of the polypeptide, the vector may be introduced into a host cell to allow expression of the polypeptide within the host cell. The expression vectors may contain a variety of elements for controlling expression, including without limitation, promoter sequences, transcription initiation sequences, enhancer sequences, selectable markers, and signal sequences. These elements may be selected as appropriate by a person of ordinary skill in the art. For example, the promoter sequences may be selected to promote the transcription of the polynucleotide in the vector. Suitable promoter sequences include, without limitation, T7 promoter, T3 promoter, SP6 promoter, beta-actin promoter, EFla promoter, CMV promoter, and SV40 promoter. Enhancer sequences may be selected to enhance the transcription of the polynucleotide. Selectable markers may be selected to allow selection of the host cells inserted with the vector from those not, for example, the selectable markers may be genes that confer antibiotic resistance. Signal sequences may be selected to allow the expressed polypeptide to be transported outside of the host cell.

[0621] A vector may also include materials to aid in its entry into the cell, including but not limited to a viral particle, a liposome, or a protein coating.

[0622] In some embodiments, an expression vector comprises an isolated nucleic acid sequence encoding a polypeptide of a precursor construct, or encoding a domain within a polypeptide of the precursor construct, or encoding a component part of a domain within a polypeptide of the precursor construct. Binding domains and the components thereof have been described in detail above.

[0623] In some embodiments, an expression vector comprises an isolated nucleic acid sequence encoding a polypeptide A. In some embodiments, an expression vector comprises an isolated nucleic acid sequence encoding a polypeptide B. In some embodiments, an expression vector comprises an isolated nucleic acid sequence encoding a part of a polypeptide A. In some embodiments, an expression vector comprises an isolated nucleic acid sequence encoding a part of a polypeptide B. In some embodiments, an expression vector comprises an isolated nucleic acid sequence encoding a first binding domain. In some embodiments, an expression vector comprises an isolated nucleic acid sequence encoding an scFv of a first binding domain. In some embodiments, an expression vector comprises an isolated nucleic acid sequence encoding an scFv of a second binding domain. In some embodiments, an expression vector comprises an isolated nucleic acid sequence encoding part of an scFv of a first binding domain. In some embodiments, an expression vector comprises an isolated nucleic acid sequence encoding part of an scFv of a second binding domain. In some embodiments, an expression vector comprises an isolated nucleic acid sequence encoding an EGFR binding domain. In some embodiments, an expression vector comprises an isolated nucleic acid sequence encoding an EGFR scFv binding domain. In some embodiments, an expression vector comprises an isolated nucleic acid sequence encoding a Natural Killer cell scFv binding domain. In some embodiments, an expression vector comprises an isolated nucleic acid sequence encoding a VH region of a CD3 epsilon binding domain. In some embodiments, an expression vector comprises an isolated nucleic acid sequence encoding a VL region of a CD3 epsilon binding domain. In some embodiments, an expression vector comprises an isolated nucleic acid sequence encoding a CAP regulatory domain. In some embodiments, an expression vector comprises an isolated nucleic acid sequence encoding an HSA regulatory domain. In some embodiments, an expression vector comprises an isolated nucleic acid sequence encoding a component part of a regulatory domain. In some embodiments, an expression vector comprises an isolated nucleic acid sequence encoding a CAP component of a regulatory domain. In some embodiments, an expression vector comprises an isolated nucleic acid sequence encoding an HSA component of a regulatory domain. In some embodiments, an expression vector comprises an isolated nucleic acid sequence encoding a CAP component of a regulatory domain, and a linker(s) including a protease cleavable linker. In some embodiments, an expression vector comprises an isolated nucleic acid sequence encoding a HSA component of a regulatory domain, and a linker(s) including a protease cleavable linker.

[0624] For cloning of the polynucleotide, the vector may be introduced into a host cell (an isolated host cell) to allow replication of the vector itself and thereby amplify the copies of the polynucleotide contained therein. The cloning vectors may contain sequence components generally include, without limitation, an origin of replication, promoter sequences, transcription initiation sequences, enhancer sequences, and selectable markers. These elements may be selected as appropriate by a person of ordinary skill in the art. For example, the origin of replication may be selected to promote autonomous replication of the vector in the host cell.

[0625] In certain embodiments, the present disclosure provides isolated host cells containing the vector provided herein. The host cells containing the vector may be useful in expression or cloning of the polynucleotide(s) contained in the vector.

[0626] Suitable host cells can include, without limitation, prokaryotic cells, fungal cells, yeast cells, or higher eukaryotic cells such as mammalian cells.

[0627] Suitable prokaryotic cells for this purpose include, without limitation, eubacteria, such as Gram-negative or Gram-positive organisms, for example, Enterobactehaceae such as Escherichia, e.g., E. coli, Enterobacter, Erwinia, Klebsiella, Proteus, Salmonella, e.g., Salmonella typhimurium, Serratia, e.g., Serratia marcescans, and Shigella, as well as Bacilli such as B. subtilis and B. licheniformis, Pseudomonas such as P. aeruginosa, and Streptomyces.

[0628] The expression of antibodies and antigen-binding fragments in prokaryotic cells such as E. coli is well established in the art. For a review, see for example Pluckthun, A. Bio/Technology 9: 545-551 (1991). Expression in eukaryotic cells in culture is also available to those skilled in the art as an option for production of antibodies or antigen-binding fragments thereof, see recent reviews, for example Ref, M. E. (1993) Curr. Opinion Biotech. 4: 573-576; Trill J. J. et al. (1995) Curr. Opinion Biotech 6: 553-560.

[0629] Suitable fungal cells for this purpose include, without limitation, filamentous fungi and yeast. Illustrative examples of fungal cells include, Saccharomyces cerevisiae, common baker’s yeast, Schizosaccharomyces pombe, Kluyveromyces hosts such as, eg., K. lactis, K. fragilis (ATCC 12,424), K. bulgaricus (ATCC 16,045), K. wickeramii (ATCC 24,178), K. waltii (ATCC 56,500), K. drosophilarum (ATCC 36,906), K. thermotolerans, and K. marxianus; yarrowia (EP 402,226); Pichia pastoris (EP 183,070); Candida; Trichoderma reesia (EP 244,234); Neurospora crassa; Schwanniomyces such as Schwanniomyces occidentalis; and filamentous fungi such as, e.g., Neurospora, Penicillium, Tolypocladium, and Aspergillus hosts such as A. nidulans and A. niger.

[0630] Higher eukaryotic cells, in particular, those derived from multicellular organisms can be used for expression of glycosylated polypeptide provided herein. Suitable higher eukaryotic cells include, without limitation, invertebrate cells and insect cells, and vertebrate cells. Examples of invertebrate cells include plant and insect cells. Numerous baculoviral strains and variants and corresponding permissive insect host cells from hosts such as Spodoptera frugiperda (caterpillar), Aedes aegypti (mosquito), Aedes albopictus (mosquito), Drosophila melanogaster (fruiffly), and Bombyx mori have been identified. A variety of viral strains for transfection are publicly available, e.g., the K-1 variant of Autographa californica NPV and the Bm-5 strain of Bombyx mori NPV, and such viruses may be used as the virus herein as described herein, particularly for transfection of Spodoptera frugiperda cells. Plant cell cultures of cotton, corn, potato, soybean, petunia, tomato, and tobacco can also be utilized as hosts. Examples of vertebrate cells include mammalian host cell lines such as monkey kidney CV1 line transformed by SV40 (COS-7, ATCC CRL 1651); human embryonic kidney line (293 or 293 cells subcloned for growth in suspension culture, Graham et al., J. Gen Virol. 36:59 (1977)); baby hamster kidney cells (BHK, ATCC CCL 10); Chinese hamster ovary cells/-DHFR (CHO, Urlaub et al., Proc. Natl. Acad. Sci. USA 77:4216 (1980)); mouse Sertoli cells (TM4, Mather, Biol. Reprod. 23:243-251 (1980)); monkey kidney cells (CV1 ATCC CCL 70); African green monkey kidney cells (VERO-76, ATCC CRK-1587); human cervical carcinoma cells (HELA, ATCC CCL 2); canine kidney cells (MDCK, ATCC CCL 34); buffalo rat liver cells (BRL 3A, ATCC CRL 1442); human lung cells (W138, ATCC CCL 75); human liver cells (Hep G2, HB 8065); mouse mammary tumor (MMT 060562, ATCC CCL51); TRI cells (Mather et al., Annals N.Y. Acad. Sci. 383:44-68 (1982)); MRC 5 cells; FS4 cells; and a human hepatoma line (Hep G2).

[0631] The vector can be introduced to the host cell using any suitable methods known in the art, including, without limitation, DEAE-dextran mediated delivery, calcium phosphate precipitate method, cationic lipids mediated delivery, liposome mediated transfection, electroporation, microprojectile bombardment, receptor-mediated gene delivery, delivery mediated by polylysine, histone, chitosan, and peptides. Standard methods for transfection and transformation of cells for expression of a vector of interest are well known in the art.

[0632] In certain embodiments, the host cells comprise a first vector encoding a first polypeptide and a second vector encoding a second polypeptide. In certain embodiments, the first vector and the second vector may be the same or not the same. In certain embodiments, the first polypeptide and the second polypeptide may be the same or not the same.

[0633] In certain embodiments, the host cells comprise a first vector encoding a polypeptide A and a second vector encoding a polypeptide B. In certain embodiments, the first vector and the second vector may be the same or not the same. In certain embodiments, the polypeptide A and the polypeptide B may be encoded on the same vector.

[0634] In some embodiments, an isolated cell comprises an isolated nucleic acid sequence, as disclosed herein. In some embodiments, an isolated cell comprises two isolated nucleic acid sequences as disclosed herein, wherein one nucleic acid encodes polypeptide A and the other nucleic acid encodes polypeptide B. In some embodiments, an isolated cell comprises two expression vectors as disclosed herein, wherein one vector comprises a nucleic acid encoding polypeptide A and the other vector comprises a nucleic acid encoding polypeptide B.

[0635] In certain embodiments, the first vector and the second vector may or may not be introduced simultaneously. In certain embodiments, the first vector and the second vector may be introduced together into the host cell. In certain embodiments, the first vector may be introduced first into the host cell, and then the second vector may be introduced. In certain embodiments, the first vector may be introduced into the host cell which is then established into a stable cell line expressing the first polypeptide, and then the second vector may be introduced into the stable cell line.

[0636] In certain embodiments, the host cells comprise a vector encoding for a first polypeptide and a second polypeptide.

[0637] In certain embodiments, the present disclosure provides methods of expressing the polypeptide provided herein, comprising culturing the host cell containing the vector under conditions in which the inserted polynucleotide in the vector is expressed.

[0638] Suitable conditions for expression of the polynucleotide may include, without limitation, suitable medium, suitable density of host cells in the culture medium, presence of necessary nutrients, presence of supplemental factors, suitable temperatures and humidity, and absence of microorganism contaminants. A person with ordinary skill in the art can select the suitable conditions as appropriate for the purpose of the expression.

[0639] In some embodiments, a method of producing a precursor tri-specific antibody construct comprising (a) a first binding domain binding to a cell surface tumor associated antigen (TAA binding domain); (b) a second binding domain binding to a NK surface antigen; (c) a third binding domain binding to an extracellular epitope of a T cell or NK cell surface antigen; (d) a CAP regulatory domain; and (e) an HSA regulatory domain, comprises steps of culturing a cell or cells comprising a nucleic acid sequence encoding polypeptide A and polypeptide B of the precursor tri-specific antibody construct, wherein said precursor tri-specific antibody construct polypeptides are expressed and isolated, and wherein said isolated polypeptides A and B form a heterodimer. As disclosed herein in detail, the isolated nucleic acid sequences encoding polypeptides A and B may be comprised within vectors, wherein the same vector or different vectors are used. In some embodiments, each polypeptide may be expressed from a different host cell, wherein dimerization occurs following isolation or purification of the component polypeptides A and B. In some embodiments, polypeptides A and B may be expressed from a same host cell, wherein dimerization occurs in culture or following isolation or purification of the component polypeptides A and B.

[0640] In certain embodiments, the polypeptide expressed in the host cell can form a dimer and thus produce a precursor tri-specific antibody construct dimer, for example a heterodimer comprising a polypeptide A and a polypeptide B. In certain embodiments, where the host cells express a first polynucleotide and a second polynucleotide, the first polynucleotide (A) and the second polynucleotide (B) can form a polypeptide complex which is a heterodimer.

[0641] In certain embodiments, the polypeptide complex may be formed inside the host cell. For example, the heterodimer may be formed inside the host cell with the aid of relevant enzymes and/or cofactors. In certain embodiments, the polypeptide complex may be secreted out of the cell. In certain embodiments, the first polypeptide (A) and the second polypeptide (B) may be secreted out of the host cell and form a heterodimer outside of the host cell.

[0642] In certain embodiments, the first polypeptide and the second polypeptide may be separately expressed and allowed to dimerize under suitable conditions. For example, the first polypeptide (A) and the second polypeptide (B) may be combined in a suitable buffer and allow the first protein monomer (A) and the second protein monomer (B) to dimerize through appropriate interactions such as hydrophobic interactions. For another example, the first polypeptide (A) and the second polypeptide (B) may be combined in a suitable buffer containing an enzyme and/or a cofactor which can promote the dimerization of the first polypeptide (A) and the second polypeptide (B). For another example, the first polypeptide (A) and the second polypeptide (A) may be combined in a suitable vehicle and allow them to react with each other in the presence of a suitable reagent and/or catalyst.

[0643] In certain embodiments, the first polypeptide (A) and the second polypeptide (B) may be generated by DNA synthesis and PCR. In certain embodiments, the generated sequences may be subcloned into an expression vector. In certain embodiments, the generated sequences may be subcloned into two expression vectors. In certain embodiments, said expression vector is a plasmid. In certain embodiments, said plasmid is pTT5-based plasmid.

[0644] In certain embodiments, transient expression is performed by co-transfecting the expression vector encoding the first polypeptide (A) and the second polypeptide (B) or by transfecting an expression vector encoding both into a suitable cell. A skilled artisan would appreciate that there are a number of transfection methods and protocols that can be used for this purpose. In certain embodiments, transfection or co-transfection is executed using the PEI method. In certain embodiments, 1L of CHO cells at approximately 2.3×106/ml in a 3 L shake flask is used as the host. Transfection is initiated by adding a mixture of 2 mg of total DNA and 4 mg PEI in 100 ml OptiMEM medium (Invitrogen) to the cells and gentle mixing. Cells are then cultured in an incubator shaker at 120 rpm, 37° C., and 8% CO2, for 8-10 days. Feeding with peptone and glucose is carried out 24 h later and every 2-3 days thereafter depending on the cell density and viability. The cell culture is terminated on day 8-10 when cell viability reduces to <70%. The conditioned medium is then harvested for protein purification.

[0645] The expressed polypeptides (A) and (B) and/or the polypeptide complex can be collected using any suitable methods. The polypeptides (A) and (B) and/or the polypeptide complex can be expressed intracellularly, in the periplasmic space or be secreted outside of the cell into the medium. If the polypeptides (A) and (B) and/or the polypeptide complex is expressed intracellularly, the host cells containing the polypeptides (A) and (B) and/or the polypeptide complex may be lysed and polypeptide and/or the polypeptide complex may be isolated from the lysate by removing the unwanted debris by centrifugation or ultrafiltration. If the polypeptides (A) and (B) and/or the polypeptide complex is secreted into periplasmic space of E. coli, the cell paste may be thawed in the presence of agents such as sodium acetate (pH 3.5), EDTA, and phenylmethylsulfonylfluoride (PMSF) over about 30 min, and cell debris can be removed by centrifugation (Carter et al., BioTechnology 10:163-167 (1992)). If the polypeptides (A) and (B) and/or the polypeptide complex is secreted into the medium, the supernatant of the cell culture may be collected and concentrated using a commercially available protein concentration filter, for example, an Amincon or Millipore Pellicon ultrafiltration unit. A protease inhibitor and/or an antibiotic may be included in the collection and concentration steps to inhibit protein degradation and/or growth of contaminated microorganisms.

[0646] The expressed polypeptides (A) and (B) and/or the polypeptide complex can be further purified by a suitable method, such as without limitation, affinity chromatography, hydroxylapatite chromatography, size exclusion chromatography, gel electrophoresis, dialysis, ion exchange fractionation on an ion-exchange column, ethanol precipitation, reverse phase HPLC, chromatography on silica, chromatography on heparin sepharose, chromatography on an anion or cation exchange resin (such as a polyaspartic acid column), chromatofocusing, SDS-PAGE, and ammonium sulfate precipitation (see, for review, Bonner, P. L., Protein purification, published by Taylor & Francis, 2007; Janson, J. C., et al, Protein purification: principles, high resolution methods and applications, published by Wiley-VCH, 1998).

[0647] In certain embodiments, the polypeptides (A) and (B) and/or polypeptide dimer complexes can be purified by affinity chromatography. In certain embodiments, protein A chromatography or protein A/G (fusion protein of protein A and protein G) chromatography can be useful for purification of polypeptides and/or polypeptide complexes comprising a component derived from antibody CH2 domain and/or CH3 domain (Lindmark et al., J. Immunol. Meth. 62:1-13 (1983)); Zettlit, K. A., Antibody Engineering, Part V, 531-535, 2010). In certain embodiments, a precursor tri-specific antibody construct disclosed herein does not bind to protein A. In certain embodiments, protein G chromatography can be useful for purification of polypeptides and/or polypeptide complexes comprising IgGγ3 heavy chain (Guss et al., EMBO J. 5:1567 1575 (1986)). In certain embodiments, protein L chromatography can be useful for purification of polypeptides and/or polypeptide complexes comprising K light chain (Sudhir, P., Antigen engineering protocols, Chapter 26, published by Humana Press, 1995; Nilson, B. H. K. et al, J. Biol. Chem., 267, 2234-2239 (1992)). The matrix to which the affinity ligand is attached is most often agarose, but other matrices are available. Mechanically stable matrices such as controlled pore glass or poly(styrenedivinyl)benzene allow for faster flow rates and shorter processing times than can be achieved with agarose. Where the antibody comprises a CH3 domain, the Bakerbond ABX resin (J. T. Baker, Phillipsburg, N.J.) is useful for purification.

[0648] Following any preliminary purification step(s), the mixture comprising the precursor tri-specific antibody construct and contaminants may be subjected to low pH hydrophobic interaction chromatography using an elution buffer at a pH between about 2.5-4.5, preferably performed at low salt concentrations (e.g., from about 0-0.25 M salt).

[0649] In certain embodiments, the polypeptides (A) and (B) and/or polypeptide dimer complexes can be purified by affinity chromatography and size exclusion chromatography (SEC). A skilled artisan would appreciate that there are a number of methods and protocols suitable for this purpose. In certain embodiments, protein purification by affinity chromatography and SEC is performed using an AKTA pure instrument (GE Lifesciences). In certain embodiments, affinity capture of the precursor bispecific antibody is achieved by passing the harvested supernatants over a column of CaptureSelect™ CH1-XL Affinity Matrix (Thermo Scientific). After washing column with PBS, the protein is eluted with 0.1 M Glycine, pH 2.5, and immediately neutralized with ⅙ volume of 1 M Tris-HCl, pH 8.0. The affinity purified protein is then concentrated to 5-10 mg/ml using Amicon 30 kD concentrator (Merck Millipore) and subjected to SEC purification on a Superdex200 column (GE Lifesciences) equilibrated with PBS. Protein fractions are then collected and analyzed using SDS-PAGE and HPLC-SEC.

### Methods of Use of Precursor Tri-specific Antibody Constructs

[0650] In some embodiments, described herein are compositions comprising the precursor tri-specific antibody construct as described herein and administration of such composition in a variety of therapeutic settings. In one embodiment, the precursor tri-specific antibody construct comprises three binding domains. In one embodiment, the third binding domain is a Fab, and the first and second binding domains are scFv. In one embodiment, the third binding domain binds to a T cell surface antigen, the first binding domain binds to a TAA and the second binding domain binds to a NK cell surface antigen. In another embodiment, the third binding domain binds to a NK cell surface antigen, the first binding domain binds to a TAA and the second binding domain binds to another NK cell surface antigen. In another embodiment, the third binding domain binds to a NK cell surface antigen, the first binding domain binds to a TAA and the second binding domain comprises a cytokine receptor engager (e.g. IL-15).

[0651] Administration of the precursor tri-specific antibody constructs described herein, in pure form or in an appropriate pharmaceutical composition, can be carried out via any of the accepted modes of administration of agents for serving similar utilities. The pharmaceutical compositions can be prepared by combining a precursor tri-specific antibody construct or a precursor tri-specific antibody construct-containing composition with an appropriate physiologically acceptable carrier, diluent or excipient, and may be formulated into preparations in solid, semi-solid, liquid or gaseous forms, such as tablets, capsules, powders, granules, ointments, solutions, suppositories, injections, inhalants, gels, microspheres, and aerosols. In addition, other pharmaceutically active ingredients (including other anti-cancer agents as described elsewhere herein) and/or suitable excipients such as salts, buffers and stabilizers may, but need not, be present within the composition. Administration may be achieved by a variety of different routes, including oral, parenteral, nasal, intravenous, intradermal, subcutaneous or topical. In some embodiments, modes of administration depend upon the nature of the condition to be treated or prevented. An amount that, following administration, reduces, inhibits, prevents or delays the progression and/or metastasis of a cancer is considered effective. A skilled artisan would appreciate that the term “physiologically acceptable carrier, diluent or excipient”, may in some embodiments be used interchangeably with the term “pharmaceutically acceptable carrier” having all the same means and qualities.

[0652] In some embodiments, a pharmaceutical composition described herein comprises a nucleotide sequence encoding a precursor tri-specific antibody construct. In some embodiments, a nucleotide sequence encoding a precursor construct disclosed herein, comprises a single linear nucleotide sequence. In some embodiments, a nucleotide sequence encoding a precursor construct disclosed herein, comprises two nucleotide sequences. In some embodiments, a nucleotide sequence encoding a precursor construct disclosed herein, comprises two nucleotide sequences present on the same vector. In some embodiments, a nucleotide sequence encoding a precursor construct disclosed herein, comprises two nucleotide sequences present on different vectors.

[0653] In some embodiments, the nucleotide sequence encodes polypeptide A and polypeptide B. In some embodiments, the same nucleotide sequence encodes polypeptide A and polypeptide B. In some embodiments, different nucleotide sequences encode polypeptide A and polypeptide B. In some embodiments, one nucleotide sequence encodes polypeptide A and another nucleotide sequence encodes polypeptide B. In some embodiments, one nucleotide sequence encodes polypeptide A and another nucleotide sequence encodes polypeptide B having a protease cleavage sequence between them, thus allowing polypeptide A and polypeptide B to hetero-dimerize, as described in Duperret EK et al., Cancer Res, Oct. 4 (doi: 10.1158/0008-5472.CAN-18-1429)In some embodiments, a method of treating, preventing, inhibiting the growth of, delaying disease progression, reducing the tumor load, or reducing the incidence of a cancer or a tumor in a subject, or any combination thereof, comprises a step of administering to a subject in need thereof a pharmaceutical composition comprising one of the precursor tri-specific antibody constructs disclosed herein, wherein the method treats, prevents, inhibits the growth of, delays the disease progression, reduces the tumor load, or reduces the incidence of the cancer or a tumor in said subject, or reduces the minimal residual disease, increases remission, increases remission duration, reduces tumor relapse rate, prevents metastasis of said tumor or said cancer, or reduces the rate of metastasis of said tumor or said cancer, or any combination thereof, compared with a subject not administered said pharmaceutical composition.

[0654] In some embodiments, a method of treating, preventing, inhibiting the growth of, delaying disease progression, reducing the tumor load, or reducing the incidence of a cancer or a tumor in a subject, or any combination thereof, comprises a step of administering to a subject in need thereof a pharmaceutical composition comprising a nucleotide sequence encoding one of the precursor bispecific antibody constructs disclosed herein, wherein the method treats, prevents, inhibits the growth of, delays the disease progression, reduces the tumor load, or reduces the incidence of the cancer or a tumor in said subject, or reduces the minimal residual disease, increases remission, increases remission duration, reduces tumor relapse rate, prevents metastasis of said tumor or said cancer, or reduces the rate of metastasis of said tumor or said cancer, or any combination thereof, compared with a subject not administered said pharmaceutical composition.

[0655] A skilled artisan would appreciate that the term “treating” and grammatical forms thereof, may in some embodiments encompass both therapeutic treatment and prophylactic or preventative measures with respect to a tumor or cancer as described herein, wherein the object is to prevent or lessen the targeted tumor or cancer as described herein. Thus, in some embodiments of methods disclosed herein, treating may include directly affecting or curing, suppressing, inhibiting, preventing, reducing the severity of, delaying the onset of, reducing symptoms associated with the disease, disorder or condition, or a combination thereof; for example, when said disease or disorder comprises a cancer or tumor. Thus, in some embodiments, “treating” encompasses preventing, delaying progression, inhibiting the growth of, delaying disease progression, reducing tumor load, reducing the incidence of, expediting remission, inducing remission, augmenting remission, speeding recovery, increasing efficacy of or decreasing resistance to alternative therapeutics, or a combination thereof. In some embodiments, “preventing” encompasses delaying the onset of symptoms, preventing relapse to a disease, decreasing the number or frequency of relapse episodes, increasing latency between symptomatic episodes, or a combination thereof. In some embodiments, “suppressing” or “inhibiting”, encompass reducing the severity of symptoms, reducing the severity of an acute episode, reducing the number of symptoms, reducing the incidence of disease-related symptoms, reducing the latency of symptoms, ameliorating symptoms, reducing secondary symptoms, reducing secondary infections, prolonging patient survival, or a combination thereof.

[0656] In some embodiments, the size of a cancer or tumor is reduced. In some embodiments, the growth rate of a cancer or tumor is reduced. In some embodiments, the size or the growth rate or a combination thereof, of a cancer or tumor is reduced. In some embodiments, the survival of the subject in need is increased. In some embodiments, the size or the growth rate or a combination thereof, of a cancer or tumor is reduced, or wherein the survival of the subject in need is increased or a combination thereof.

[0657] In some embodiments, the subject in need is a human subject. In some embodiments, the subject in need is a human child. In some embodiments, the subject in need is an adult human. In some embodiments, the subject in need is a human infant.

[0658] In certain embodiments, the amount administered is sufficient to result in tumor regression, as indicated by a statistically significant decrease in the amount of viable tumor, for example, at least a 50% decrease in tumor mass, or by altered (e.g., decreased with statistical significance) scan dimensions. In other embodiments, the amount administered is sufficient to result in clinically relevant reduction in disease symptoms as would be known to the skilled clinician.

[0659] The precise dosage and duration of treatment is a function of the disease being treated and may be determined empirically using known testing protocols or by testing the compositions in model systems known in the art and extrapolating therefrom. Controlled clinical trials may also be performed. Dosages may also vary with the severity of the condition to be alleviated. A pharmaceutical composition is generally formulated and administered to exert a therapeutically useful effect while minimizing undesirable side effects. The composition may be administered one time, or may be divided into a number of smaller doses to be administered at intervals of time. For any particular subject, specific dosage regimens may be adjusted over time according to the individual need.

[0660] The precursor tri-specific antibody construct-containing compositions may be administered alone or in combination with other known cancer treatments, such as radiation therapy, chemotherapy, transplantation, immunotherapy, hormone therapy, photodynamic therapy, etc. In some embodiments, compositions comprising nucleotide sequences encoding a precursor bispecific antibody construct, may be administered alone or in combination with other known cancer treatments, such as radiation therapy, chemotherapy, transplantation, immunotherapy, hormone therapy, photodynamic therapy, etc. The compositions may also be administered in combination with antibiotics.

[0661] Typical routes of administering these and related pharmaceutical compositions thus include, without limitation, oral, topical, transdermal, inhalation, parenteral, sublingual, buccal, rectal, vaginal, and intranasal. The term parenteral as used herein includes subcutaneous injections, intravenous, intramuscular, intrasternal injection or infusion techniques. Pharmaceutical compositions according to certain embodiments as described herein, are formulated so as to allow the active ingredients contained therein to be bioavailable upon administration of the composition to a patient. Compositions that will be administered to a subject or patient may take the form of one or more dosage units, where for example, a tablet may be a single dosage unit, and a container of a herein described precursor tri-specific antibody construct in aerosol form may hold a plurality of dosage units. Actual methods of preparing such dosage forms are known, or will be apparent, to those skilled in this art; for example, see Remington: The Science and Practice of Pharmacy, 20th Edition (Philadelphia College of Pharmacy and Science, 2000). The composition to be administered will, in any event, contain a therapeutically effective amount of a precursor bispecific antibody construct of the present disclosure, for treatment of a disease or condition of interest in accordance with teachings herein.

[0662] A pharmaceutical composition may be in the form of a solid or liquid. In one embodiment, the pharmaceutically acceptable carrier(s) are particulate, so that the compositions are, for example, in tablet or powder form. The pharmaceutically acceptable carrier(s) may be liquid, with the compositions being, for example, an oral oil, injectable liquid or an aerosol, which is useful in, for example, inhalatory administration. When intended for oral administration, the pharmaceutical composition is preferably in either solid or liquid form, where semi-solid, semi-liquid, suspension and gel forms are included within the forms considered herein as either solid or liquid.

[0663] As a solid composition for oral administration, the pharmaceutical composition may be formulated into a powder, granule, compressed tablet, pill, capsule, chewing gum, wafer or the like. Such a solid composition will typically contain one or more inert diluents or edible pharmaceutically acceptable carriers. In addition, one or more of the following may be present: binders such as carboxymethylcellulose, ethyl cellulose, microcrystalline cellulose, gum tragacanth or gelatin; excipients such as starch, lactose or dextrins, disintegrating agents such as alginic acid, sodium alginate, Primogel, corn starch and the like; lubricants such as magnesium stearate or Sterotex; glidants such as colloidal silicon dioxide; sweetening agents such as sucrose or saccharin; a flavoring agent such as peppermint, methyl salicylate or orange flavoring; and a coloring agent. When the pharmaceutical composition is in the form of a capsule, for example, a gelatin capsule, it may contain, in addition to materials of the above type, a liquid pharmaceutically acceptable carrier such as polyethylene glycol or oil.

[0664] The pharmaceutical composition may be in the form of a liquid, for example, an elixir, syrup, solution, emulsion or suspension. The liquid may be for oral administration or for delivery by injection, as two examples. When intended for oral administration, preferred composition contain, in addition to the present compounds, one or more of a sweetening agent, preservatives, dye/colorant and flavor enhancer. In a composition intended to be administered by injection, one or more of a surfactant, preservative, wetting agent, dispersing agent, suspending agent, buffer, stabilizer and isotonic agent may be included.

[0665] The liquid pharmaceutical compositions, whether they be solutions, suspensions or other like form, may include one or more of the following adjuvants: sterile diluents such as water for injection, saline solution, preferably physiological saline, Ringer’s solution, isotonic sodium chloride, fixed oils such as synthetic mono or diglycerides which may serve as the solvent or suspending medium, polyethylene glycols, glycerin, propylene glycol or other solvents; antibacterial agents such as benzyl alcohol or methyl paraben; antioxidants such as ascorbic acid or sodium bisulfite; chelating agents such as ethylenediaminetetraacetic acid; buffers such as acetates, citrates or phosphates and agents for the adjustment of tonicity such as sodium chloride or dextrose. The parenteral preparation can be enclosed in ampoules, disposable syringes or multiple dose vials made of glass or plastic. Physiological saline is a preferred adjuvant. An injectable pharmaceutical composition is preferably sterile.

[0666] A liquid pharmaceutical composition intended for either parenteral or oral administration should contain an amount of a precursor tri-specific antibody construct as herein disclosed such that a suitable dosage will be obtained. Typically, this amount is at least 0.01% of the precursor bispecific antibody construct in the composition. When intended for oral administration, this amount may be varied to be between 0.1 and about 70% of the weight of the composition. Certain oral pharmaceutical compositions contain between about 4% and about 75% of the precursor bispecific antibody construct. In certain embodiments, pharmaceutical compositions and preparations according to the embodiments described herein, are prepared so that a parenteral dosage unit contains between 0.01 to 10% by weight of the precursor tri-specific antibody construct prior to dilution.

[0667] The pharmaceutical composition may be intended for topical administration, in which case the pharmaceutically acceptable carrier may suitably comprise a solution, emulsion, ointment or gel base. The base, for example, may comprise one or more of the following: petrolatum, lanolin, polyethylene glycols, bee wax, mineral oil, diluents such as water and alcohol, and emulsifiers and stabilizers. Thickening agents may be present in a pharmaceutical composition for topical administration. If intended for transdermal administration, the composition may include a transdermal patch or iontophoresis device. The pharmaceutical composition may be intended for rectal administration, in the form, for example, of a suppository, which will melt in the rectum and release the drug. The composition for rectal administration may contain an oleaginous base as a suitable nonirritating excipient. Such bases include, without limitation, lanolin, cocoa butter and polyethylene glycol.

[0668] The pharmaceutical composition may include various materials, which modify the physical form of a solid or liquid dosage unit. For example, the composition may include materials that form a coating shell around the active ingredients. The materials that form the coating shell are typically inert, and may be selected from, for example, sugar, shellac, and other enteric coating agents. Alternatively, the active ingredients may be encased in a gelatin capsule. The pharmaceutical composition in solid or liquid form may include an agent that binds to the antibody as disclosed herein, and thereby assists in the delivery of the compound. Suitable agents that may act in this capacity include other monoclonal or polyclonal antibodies, one or more proteins or a liposome. The pharmaceutical composition may consist essentially of dosage units that can be administered as an aerosol. The term aerosol is used to denote a variety of systems ranging from those of colloidal nature to systems consisting of pressurized packages. Delivery may be by a liquefied or compressed gas or by a suitable pump system that dispenses the active ingredients. Aerosols may be delivered in single phase, bi-phasic, or tri-phasic systems in order to deliver the active ingredient(s). Delivery of the aerosol includes the necessary container, activators, valves, subcontainers, and the like, which together may form a kit. One of ordinary skill in the art, without undue experimentation may determine preferred aerosols.

[0669] The pharmaceutical compositions may be prepared by methodology well known in the pharmaceutical art. For example, a pharmaceutical composition intended to be administered by injection can be prepared by combining a composition that comprises a precursor tri-specific antibody construct as described herein and optionally, one or more of salts, buffers and/or stabilizers, with sterile, distilled water so as to form a solution. A surfactant may be added to facilitate the formation of a homogeneous solution or suspension. Surfactants are compounds that non-covalently interact with the precursor bispecific antibody construct composition so as to facilitate dissolution or homogeneous suspension of the precursor bispecific antibody construct in the aqueous delivery system.

[0670] The compositions may be administered in a therapeutically effective amount, which will vary depending upon a variety of factors including the activity of the specific compound (e.g., precursor bispecific antibody construct) employed; the metabolic stability and length of action of the compound; the age, body weight, general health, sex, and diet of the patient; the mode and time of administration; the rate of excretion; the drug combination; the severity of the particular disorder or condition; and the subject undergoing therapy. Generally, a therapeutically effective daily dose is (for a 70 kg mammal) from about 0.001 mg/kg (i.e., 0.07 mg) to about 100 mg/kg (i.e., 7.0 g); preferably a therapeutically effective dose is (for a 70 kg mammal) from about 0.01 mg/kg (i.e., 0.7 mg) to about 50 mg/kg (i.e., 3.5 g); more preferably a therapeutically effective dose is (for a 70 kg mammal) from about 1 mg/kg (i.e., 70 mg) to about 25 mg/kg (i.e., 1.75 g).

[0671] Compositions comprising the precursor tri-specific antibody construct of the present disclosure or comprising a nucleotide sequence encoding the precursor tri-specific antibody construct may also be administered simultaneously with, prior to, or after administration of one or more other therapeutic agents. Such combination therapy may include administration of a single pharmaceutical dosage formulation which contains a compound as disclosed herein, and one or more additional active agents, as well as administration of compositions comprising precursor tri-specific antibody construct as disclosed herein, and each active agent in its own separate pharmaceutical dosage formulation. For example, a precursor tri-specific antibody construct or comprising a nucleotide sequence encoding the precursor tri-specific antibody construct, as described herein, and the other active agent can be administered to the patient together in a single oral dosage composition such as a tablet or capsule, or each agent administered in separate oral dosage formulations. Similarly, a precursor tri-specific antibody construct or comprising a nucleotide sequence encoding the precursor tri-specific antibody construct, as described herein, and the other active agent can be administered to the patient together in a single parenteral dosage composition such as in a saline solution or other physiologically acceptable solution, or each agent administered in separate parenteral dosage formulations. Where separate dosage formulations are used, the compositions comprising precursor tri-specific antibody construct or comprising a nucleotide sequence encoding the precursor tri-specific antibody construct, and one or more additional active agents can be administered at essentially the same time, i.e., concurrently, or at separately staggered times, i.e., sequentially and in any order; combination therapy is understood to include all these regimens.

[0672] Thus, in certain embodiments, also contemplated is the administration of precursor tri-specific antibody construct compositions of this disclosure or comprising a nucleotide sequence encoding the precursor tri-specific antibody construct, in combination with one or more other therapeutic agents. Such therapeutic agents may be accepted in the art as a standard treatment for a particular disease state as described herein, such as cancer, inflammatory disorders, allograft transplantation, type I diabetes, and multiple sclerosis. Exemplary therapeutic agents contemplated include cytokines, growth factors, steroids, NSAIDs, DMARDs, anti-inflammatories, chemotherapeutics, radiotherapeutics, or other active and ancillary agents.

[0673] In certain embodiments, the precursor tri-specific antibody construct or comprising a nucleotide sequence encoding the precursor tri-specific antibody construct, disclosed herein may be administered in conjunction with any number of chemotherapeutic agents. Examples of chemotherapeutic agents include alkylating agents such as thiotepa and cyclophosphamide (CYTOXAN.TM.); alkyl sulfonates such as busulfan, improsulfan and piposulfan; aziridines such as benzodopa, carboquone, meturedopa, and uredopa; ethylenimines and methylamelamines including altretamine, triethylenemelamine, trietylenephosphoramide, triethylenethiophosphaoramide and trimethylolomelamine; nitrogen mustards such as chlorambucil, chlornaphazine, cholophosphamide, estramustine, ifosfamide, mechlorethamine, mechlorethamine oxide hydrochloride, melphalan, novembichin, phenesterine, prednimustine, trofosfamide, uracil mustard; nitrosureas such as carmustine, chlorozotocin, fotemustine, lomustine, nimustine, ranimustine; antibiotics such as aclacinomysins, actinomycin, authramycin, azaserine, bleomycins, cactinomycin, calicheamicin, carabicin, caminomycin, carzinophilin, chromomycins, dactinomycin, daunorubicin, detorubicin, 6-diazo-5-oxo-L-norleucine, doxorubicin, epirubicin, esorubicin, idarubicin, marcellomycin, mitomycins, mycophenolic acid, nogalamycin, olivomycins, peplomycin, potfiromycin, puromycin, quelamycin, rodorubicin, streptonigrin, streptozocin, tubercidin, ubenimex, zinostatin, zorubicin; anti-metabolites such as methotrexate and 5-fluorouracil (5-FU); folic acid analogues such as denopterin, methotrexate, pteropterin, trimetrexate; purine analogs such as fludarabine, 6-mercaptopurine, thiamiprine, thioguanine; pyrimidine analogs such as ancitabine, azacitidine, 6-azauridine, carmofur, cytarabine, dideoxyuridine, doxifluridine, enocitabine, floxuridine, 5-FU; androgens such as calusterone, dromostanolone propionate, epitiostanol, mepitiostane, testolactone; anti-adrenals such as aminoglutethimide, mitotane, trilostane; folic acid replenisher such as frolinic acid; aceglatone; aldophosphamide glycoside; aminolevulinic acid; amsacrine; bestrabucil; bisantrene; edatraxate; defofamine; demecolcine; diaziquone; elformithine; elliptinium acetate; etoglucid; gallium nitrate; hydroxyurea; lentinan; lonidamine; mitoguazone; mitoxantrone; mopidamol; nitracrine; pentostatin; phenamet; pirarubicin; podophyllinic acid; 2-ethylhydrazide; procarbazine; PSK.RTM.; razoxane; sizofuran; spirogermanium; tenuazonic acid; triaziquone; 2,2′,2″-trichlorotriethylamine; urethan; vindesine; dacarbazine; mannomustine; mitobronitol; mitolactol; pipobroman; gacytosine; arabinoside (“Ara-C”); cyclophosphamide; thiotepa; taxoids, e.g. paclitaxel (TAXOL.RTM., Bristol-Myers Squibb Oncology, Princeton, N.J.) and doxetaxel (TAXOTERE.RTM., Rhne-Poulenc Rorer, Antony, France); chlorambucil; gemcitabine; 6-thioguanine; mercaptopurine; methotrexate; platinum analogs such as cisplatin and carboplatin; vinblastine; platinum; etoposide (VP-16); ifosfamide; mitomycin C; mitoxantrone; vincristine; vinorelbine; navelbine; novantrone; teniposide; daunomycin; aminopterin; xeloda; ibandronate; CPT-11; topoisomerase inhibitor RFS 2000; difluoromethylomithine (DMFO); retinoic acid derivatives such as Targretin.TM. (bexarotene), Panretin.TM. (alitretinoin); ONTAK.TM. (denileukin diftitox); esperamicins; capecitabine; and pharmaceutically acceptable salts, acids or derivatives of any of the above. Also included in this definition are anti-hormonal agents that act to regulate or inhibit hormone action on tumors such as anti-estrogens including for example tamoxifen, raloxifene, aromatase inhibiting 4(5)-imidazoles, 4-hydroxytamoxifen, trioxifene, keoxifene, LY117018, onapristone, and toremifene (Fareston); and anti-androgens such as flutamide, nilutamide, bicalutamide, leuprolide, and goserelin; and pharmaceutically acceptable salts, acids or derivatives of any of the above.

[0674] A variety of other therapeutic agents may be used in conjunction with the precursor tri-specific antibody construct described herein. In one embodiment, the precursor tri-specific antibody construct or comprising a nucleotide sequence encoding the precursor tri-specific antibody construct, is administered with an anti-inflammatory agent. Anti-inflammatory agents or drugs include, but are not limited to, steroids and glucocorticoids (including betamethasone, budesonide, dexamethasone, hydrocortisone acetate, hydrocortisone, hydrocortisone, methylprednisolone, prednisolone, prednisone, triamcinolone), nonsteroidal anti-inflammatory drugs (NSAIDS) including aspirin, ibuprofen, naproxen, methotrexate, sulfasalazine, leflunomide, anti-TNF medications, cyclophosphamide and mycophenolate.

[0675] The compositions comprising herein described precursor tri-specific antibody construct or comprising a nucleotide sequence encoding the precursor tri-specific antibody construct may be administered to an individual afflicted with a disease as described herein, including, but not limited to cancer and autoimmune and inflammatory diseases. For in vivo use for the treatment of human disease, the precursor tri-specific antibody construct or comprising a nucleotide sequence encoding the precursor tri-specific antibody construct described herein are generally incorporated into a pharmaceutical composition prior to administration. A pharmaceutical composition comprises one or more of the precursor tri-specific antibody construct or comprising a nucleotide sequence encoding the precursor tri-specific antibody construct described herein in combination with a pharmaceutically acceptable carrier or excipient as described elsewhere herein. To prepare a pharmaceutical composition, an effective amount of one or more of the precursor tri-specific antibody constructs or comprising a nucleotide sequence encoding the precursor tri-specific antibody construct is mixed with any pharmaceutically acceptable carrier(s) or excipient known to those skilled in the art to be suitable for the particular mode of administration.

[0676] A pharmaceutically acceptable carrier may be liquid, semi-liquid or solid. Solutions or suspensions used for parenteral, intradermal, subcutaneous or topical application may include, for example, a sterile diluent (such as water), saline solution, fixed oil, polyethylene glycol, glycerin, propylene glycol or other synthetic solvent; antimicrobial agents (such as benzyl alcohol and methyl parabens, phenols or cresols, mercurials, chlorobutanol, methyl and propyl p-hydroxybenzoic acid esters, thimerosal, benzalkonium chloride and benzethonium chloride); antioxidants (such as ascorbic acid and sodium bisulfite; methionine, sodium thiosulfate, platinum, catalase, citric acid, cysteine, thioglycerol, thioglycolic acid, thiosorbitol, butylated hydroxyanisol, butylated hydroxytoluene, and/or propyl gallate) and chelating agents (such as ethylenediaminetetraacetic acid (EDTA)); buffers (such as acetates, citrates and phosphates). If administered intravenously, suitable pharmaceutically acceptable carriers include physiological saline or phosphate buffered saline (PBS), and solutions containing thickening and solubilizing agents, such as glucose, polyethylene glycol, polypropylene glycol and mixtures thereof.

[0677] The compositions comprising precursor tri-specific antibody construct as described herein may be prepared with pharmaceutically acceptable carriers that protect the precursor tri-specific antibody construct against rapid elimination from the body, such as time release formulations or coatings. Such pharmaceutically acceptable carriers include controlled release formulations, such as, but not limited to, implants and microencapsulated delivery systems, and biodegradable, biocompatible polymers, such as ethylene vinyl acetate, polyanhydrides, polyglycolic acid, polyorthoesters, polylactic acid and others known to those of ordinary skill in the art.

[0678] The present precursor tri-specific antibody construct are useful for the treatment of a variety of cancers or tumors. In some embodiments, the cancer or tumor comprises a solid tumor. In some embodiments, the cancer or tumor comprises a non-solid tumor. In some embodiments, the cancer or tumor comprises a metastasis of a cancer or tumor.

[0679] For example, some embodiments of a method for the treatment of a cancer are directed to cancers including, but not limited to, melanoma, non-Hodgkin’s lymphoma, Hodgkin’s disease, leukemia, plasmocytoma, sarcoma, glioma, thymoma, breast cancer, prostate cancer, colo-rectal cancer, kidney cancer, renal cell carcinoma, uterine cancer, pancreatic cancer, esophageal cancer, brain cancer, lung cancer, ovarian cancer, cervical cancer, testicular cancer, gastric cancer, esophageal cancer, multiple myeloma, hepatoma, acute lymphoblastic leukemia (ALL), acute myelogenous leukemia (AML), chronic myelogenous leukemia (CML), and chronic lymphocytic leukemia (CLL), or other cancers, by administering to a cancer patient a therapeutically effective amount of a herein disclosed precursor bispecific antibody construct or a nucleotide sequence encoding the precursor tri-specific antibody construct.

[0680] Solid tumors may be benign (not cancer), or malignant (cancer). Different types of solid tumors are named for the type of cells that form them. Examples of solid tumors for which treatment may be provided include sarcomas, carcinomas, and lymphomas. In some embodiments, solid tumors for which treatment may be provided include neoplasms (new growth of cells) or lesions (damage of anatomic structures or disturbance of physiological functions) formed by an abnormal growth of body tissue cells other than blood, bone marrow or lymphatic cells. In some embodiments, a solid tumor for which treatment may be provided consists of an abnormal mass of cells which may stem from different tissue types such as liver, colon, breast, or lung, and which initially grows in the organ of its cellular origin. However, such cancers may spread to other organs through metastatic tumor growth in advanced stages of the disease.

[0681] In some embodiments of a method for treatment of a cancer or tumor, the solid tumor or cancer comprises a sarcoma or a carcinoma, adrenocortical tumor (adenoma and carcinoma), a fibrosarcoma, a myxo-sarcoma, a liposarcoma, a chondrosarcoma, an osteogenic sarcoma, a chordoma, an angiosarcoma, an endothelio sarcoma, a lymphangiosarcoma, a lymphangioendothelio sarcoma, a synovioma, a mesothelioma, an Ewing’s tumor, a leiomyosarcoma, a rhabdomyosarcoma, a colon carcinoma, a pancreatic cancer or tumor, a breast cancer or tumor, an ovarian cancer or tumor, a prostate cancer or tumor, a squamous cell carcinoma, a squamous cell carcinoma of the lung, a basal cell carcinoma, an adenocarcinoma, a sweat gland carcinoma, a sebaceous gland carcinoma, a papillary carcinoma, a papillary adenocarcinomas, a cystadenocarcinoma, a medullary carcinoma, a bronchogenic carcinoma, a renal cell carcinoma, a hepatoma, a bile duct carcinoma, a choriocarcinoma, a seminoma, an embryonal carcinoma, a colorectal carcinoma, a desmoid tumor, a desmoplastic small round cell tumor, an endocrine tumor, a germ cell tumor, a hepatoblastoma, a hepatocellular carcinoma, a melanoma, a neuroblastoma, an osteosarcoma, a retinoblastoma, a rhabdomyosarcoma, a soft tissue sarcoma other than rhabdomyosarcoma, a Wilms, Tumor, a cervical cancer or tumor, a uterine cancer or tumor, a testicular cancer or tumor, a lung carcinoma, a small cell lung carcinoma, an anal cancer, a glioblastoma, an epithelial tumor of the head and neck, a bladder carcinoma, an epithelial carcinoma, a glioma, an astrocytoma, a medulloblastoma, a craniopharyngioma, an ependymoma, a pinealoma, a hemangioblastoma, an acoustic neuroma, an oligodenroglioma, a schwannoma, a meningioma, a melanoma, a neuroblastoma, or a retinoblastoma.

[0682] In some embodiments of a method for treatment of a cancer or tumor, the tumor or cancer comprises a non-solid tumor, that is a non-solid cancer. In some embodiments, methods for treatment of a cancer or tumor may be for a diffuse cancer, wherein the cancer is widely spread; not localized or confined. In some embodiments, a diffuse cancer may comprise a non-solid tumor. Examples of diffuse cancers include leukemias. Leukemias comprise a cancer that starts in blood-forming tissue, such as the bone marrow, and causes large numbers of abnormal blood cells to be produced and enter the bloodstream.

[0683] In some embodiments of a method for treatment of a cancer or tumor, the diffuse cancer comprises a B-cell malignancy. In some embodiments, the diffuse cancer comprises leukemia. In some embodiments, the cancer is lymphoma. In some embodiments, the lymphoma is large B-cell lymphoma.

[0684] In some embodiments of a method for treatment of a cancer or tumor, the diffuse cancer or tumor comprises a hematological tumor. In some embodiments, hematological tumors are cancer types affecting blood, bone marrow, and lymph nodes. Hematological tumors may derive from either of the two major blood cell lineages: myeloid and lymphoid cell lines. The myeloid cell line normally produces granulocytes, erythrocytes, thrombocytes, macrophages, and masT-cells, whereas the lymphoid cell line produces B, T, NK and plasma cells. Lymphomas (e.g. Hodgkin’s Lymphoma), lymphocytic leukemias, and myeloma are derived from the lymphoid line, while acute and chronic myelogenous leukemia (AML, CML), myelodysplastic syndromes and myeloproliferative diseases are myeloid in origin.

[0685] In some embodiments of a method for treatment of a cancer or tumor, the non-solid (diffuse) cancer or tumor comprises a hematopoietic malignancy, a blood cell cancer, a leukemia, a myelodysplastic syndrome, a lymphoma, a multiple myeloma (a plasma cell myeloma), an acute lymphoblastic leukemia, an acute myelogenous leukemia, a chronic myelogenous leukemia, a Hodgkin lymphoma, a non-Hodgkin lymphoma, or plasma cell leukemia.

[0686] An amount that, following administration, inhibits, prevents reduces the incidence of, reduces the tumor load, or delays the growth, progression and/or metastasis of a cancer in a statistically significant manner (i.e., relative to an appropriate control as will be known to those skilled in the art) is considered effective.

[0687] Another embodiment provides a method for preventing metastasis of a cancer including, but not limited to a solid or non-solid tumor or cancer as disclosed above, by administering to a cancer patient a therapeutically effective amount of a herein disclosed precursor tri-specific antibody construct or a nucleotide sequence encoding the precursor bispecific antibody construct (e.g., an amount that, following administration, inhibits, prevents or delays metastasis of a cancer in a statistically significant manner, i.e., relative to an appropriate control as will be known to those skilled in the art).

[0688] Another embodiment provides a method for preventing a cancer including, but not limited to a solid or non-solid tumor or cancer as disclosed above, by administering to a cancer patient a therapeutically effective amount of a herein disclosed precursor tri-specific antibody construct or a nucleotide sequence encoding the precursor bispecific antibody construct.

[0689] Another embodiment provides a method for treating, inhibiting the progression of a tumor or cancer including but not limited to a solid or non-solid tumor or cancer as disclosed above, by administering to a patient afflicted by one or more of these diseases a therapeutically effective amount of a herein disclosed precursor bispecific antibody construct or a nucleotide sequence encoding the precursor tri-specific antibody construct.

[0690] In one embodiment, the present disclosure provides a method for directing T cell and/or NK cell activation, comprising administering to a patient in need thereof an effective amount of a precursor tri-specific antibody construct that comprises a CD3 binding domain or NK cell binding domain, as described herein, that is able to specifically binds NK cells, TCRα, TCRβ, CD3γ, CD3δ, CD3ε, or a combination thereof, and a TAA first binding domain that specifically binds a TAA target, for instance, a tumor-specific antigen (e.g., EGFR) or other antigens of choice at a site or cell where T-cell and/or NK cell activation is desired.

[0691] In one embodiment, the present disclosure provides a precursor tri-specific antibody construct, comprising: (i) a first binding domain that binds to a tumor associated antigen (TAA); (ii) a second binding domain that binds to a first natural killer (NK) cell surface antigen or a second binding domain comprising a cytokine receptor engager; (iii) a third binding domain that binds to a T cell surface antigen or a second NK cell surface antigen; and (iv) a regulatory domain, said regulatory domain comprising either (a) a first and a second sub-regulatory domain, said first sub-regulatory domain comprising a first protease cleavage domain and a half-life prolonging (HLP) domain, and said second sub-regulatory domain comprising a second protease cleavage domain and a CAP component that reduces the ability of the third binding domain to bind to its target antigen; or (b) a single regulatory domain comprising a protease cleavage domain, a half-life prolonging (HLP) domain, and a CAP component that reduces the ability of the third binding domain to bind to its target antigen.

[0692] In one embodiment, the second binding domain further comprises a third regulatory domain comprising a third protease cleavage domain and a CAP component that reduces the ability of the second binding domain to bind to said first NK cell surface antigen.

[0693] In one embodiment, the first binding domain and the second binding domain each comprises a single chain variable fragment (scFv), and the third binding domain comprises a Fab antigen binding fragment. In another embodiment, the first binding domain comprises a single chain variable fragment (scFv), the second binding domain comprises two scFv, and the third binding domain comprises a Fab antigen binding fragment.

[0694] In one embodiment, the first binding domain binds to a TAA, the second binding domain binds to a NK cell surface antigen, and the third binding domain binds to T cell surface antigen CD3. In one embodiment, the first binding domain binds to 5T4, and the second binding domain binds to NKG2A. In another embodiment, the first binding domain binds to 5T4, and the second binding domain binds to NKG2D. In another embodiment, the first binding domain binds to 5T4, and the second binding domain binds to CD16.

[0695] In one embodiment, the first binding domain that binds to 5T4 comprises three complementarity determining regions (CDRs) on a heavy chain (HCDR1, HCDR2, and HCDR3) and three CDRs on a light chain (LCDR1, LCDR2, and LCDR3), wherein
[0696] (i) the HCDR1, HCDR2, and HCDR3 comprises the amino acid sequences of SEQ ID NOs:476-478, and the LCDR1, LCDR2, and LCDR3 comprises the amino acid sequences of SEQ ID NOs:480-482; or
[0697] (ii) the HCDR1, HCDR2, and HCDR3 comprises the amino acid sequences of SEQ ID NOs:484-486, and the LCDR1, LCDR2, and LCDR3 comprises the amino acid sequences of SEQ ID NOs:488-490; or
[0698] (iii) the HCDR1, HCDR2, and HCDR3 comprises the amino acid sequences of SEQ ID NOs:492-494, and the LCDR1, LCDR2, and LCDR3 comprises the amino acid sequences of SEQ ID NOs:496-498; or
[0699] (iv) the HCDR1, HCDR2, and HCDR3 comprises the amino acid sequences of SEQ ID NOs:500-502, and the LCDR1, LCDR2, and LCDR3 comprises the amino acid sequences of SEQ ID NOs:504-506; or
[0700] (v) the HCDR1, HCDR2, and HCDR3 comprises the amino acid sequences of SEQ ID NOs:508-510, and the LCDR1, LCDR2, and LCDR3 comprises the amino acid sequences of SEQ ID NOs:512-514; or
[0701] (vi) the HCDR1, HCDR2, and HCDR3 comprises the amino acid sequences of SEQ ID NOs:516-518, and the LCDR1, LCDR2, and LCDR3 comprises the amino acid sequences of SEQ ID NOs:520-522; or
[0702] (vii) the HCDR1, HCDR2, and HCDR3 comprises the amino acid sequences of SEQ ID NOs:524-526, and the LCDR1, LCDR2, and LCDR3 comprises the amino acid sequences of SEQ ID NOs:528-530; or
[0703] (viii) the HCDR1, HCDR2, and HCDR3 comprises the amino acid sequences of SEQ ID NOs:532-534, and the LCDR1, LCDR2, and LCDR3 comprises the amino acid sequences of SEQ ID NOs:536-538; or
[0704] (ix) the HCDR1, HCDR2, and HCDR3 comprises the amino acid sequences of SEQ ID NOs:540-542, and the LCDR1, LCDR2, and LCDR3 comprises the amino acid sequences of SEQ ID NOs:544-546.

[0705] In one embodiment, the first binding domain that binds to 5T4 comprises a heavy chain variable region and a light chain variable region, said heavy chain variable region and light chain variable region comprise the amino acid sequences of SEQ ID NOs:475 and 479; SEQ ID NOs:483 and 487; SEQ ID NOs:491 and 495; SEQ ID NOs:499 and 503; SEQ ID NOs:507 and 511; SEQ ID NOs:515 and 519; SEQ ID NOs:523 and 527; or SEQ ID NOs:531 and 535; SEQ ID NOs:539 and 543; SEQ ID NOs:547-548; SEQ ID NOs:549-550; SEQ ID NOs:551-552; SEQ ID NOs:553-554; SEQ ID NOs:555-556; SEQ ID NOs:557-558; SEQ ID NOs:559-560; SEQ ID NOs:561-562; SEQ ID NOs:563-564; SEQ ID NOs:565-566; SEQ ID NOs:567-568; SEQ ID NOs:569-570; SEQ ID NOs:571-572; SEQ ID NOs:573-574; SEQ ID NOs:575-576; SEQ ID NOs:577-578; SEQ ID NOs:579-580; SEQ ID NOs:581-582; SEQ ID NOs:583-584; SEQ ID NOs:585-586; SEQ ID NOs:587-588; SEQ ID NOs:589-590; SEQ ID NOs:591-592; SEQ ID NOs:593-594; SEQ ID NOs:595-596; SEQ ID NOs:597-598; SEQ ID NOs:599-600; SEQ ID NOs:601-602; SEQ ID NOs:603-604; SEQ ID NOs:605-606; SEQ ID NOs:607-608; SEQ ID NOs:609-610; SEQ ID NOs:611-612; SEQ ID NOs:613-614; SEQ ID NOs:615-616; SEQ ID NOs:617-618; SEQ ID NOs:619-620; SEQ ID NOs:621-622; SEQ ID NOs:623-624; SEQ ID NOs:625-626; SEQ ID NOs:627-628; SEQ ID NOs:629-630; SEQ ID NOs:631-632; or SEQ ID NOs:633-634.

[0706] In one embodiment, for any precursor tri-specific antibody constructs disclosed above, the second binding domain that binds to NKG2D comprises three complementarity determining regions (CDRs) on a heavy chain (HCDR1, HCDR2, and HCDR3) and three CDRs on a light chain (LCDR1, LCDR2, and LCDR3), wherein
[0707] (i) the HCDR1, HCDR2, and HCDR3 comprises the amino acid sequences of SEQ ID NOs:646-648, and the LCDR1, LCDR2, and LCDR3 comprises the amino acid sequences of SEQ ID NOs:650-652; or
[0708] (ii) the HCDR1, HCDR2, and HCDR3 comprises the amino acid sequences of SEQ ID NOs:656-658, and the LCDR1, LCDR2, and LCDR3 comprises the amino acid sequences of SEQ ID NOs:660-662; or
[0709] (iii) the HCDR1, HCDR2, and HCDR3 comprises the amino acid sequences of SEQ ID NOs:664-666, and the LCDR1, LCDR2, and LCDR3 comprises the amino acid sequences of SEQ ID NOs:668-670; or
[0710] (iv) the HCDR1, HCDR2, and HCDR3 comprises the amino acid sequences of SEQ ID NOs:672-674, and the LCDR1, LCDR2, and LCDR3 comprises the amino acid sequences of SEQ ID NOs:676-678; or
[0711] (v) the HCDR1, HCDR2, and HCDR3 comprises the amino acid sequences of SEQ ID NOs:680-682, and the LCDR1, LCDR2, and LCDR3 comprises the amino acid sequences of SEQ ID NOs:684-686.

[0712] In one embodiment, the binding domain that binds to NKG2D comprises a heavy chain variable region and a light chain variable region, said heavy chain variable region and light chain variable region comprise the amino acid sequences of SEQ ID NOs:645 and 649; SEQ ID NOs:655 and 659; SEQ ID NOs:663 and 667; SEQ ID NOs:671 and 675; SEQ ID NOs:653 and 654; or SEQ ID NOs:679 and 683.

[0713] In one embodiment, for any precursor tri-specific antibody constructs disclosed above, the second binding domain that binds to NKG2A comprises three complementarity determining regions (CDRs) on a heavy chain (HCDR1, HCDR2, and HCDR3) and three CDRs on a light chain (LCDR1, LCDR2, and LCDR3), wherein the HCDR1, HCDR2, and HCDR3 comprises the amino acid sequences of SEQ ID NOs:636-638, and the LCDR1, LCDR2, and LCDR3 comprises the amino acid sequences of SEQ ID NOs:640-642. In one embodiment, the second binding domain that binds to NKG2A comprises a heavy chain variable region and a light chain variable region, said heavy chain variable region and light chain variable region comprise the amino acid sequences of SEQ ID NOs:635 and 639; or SEQ ID NOs:643 and 644.

[0714] In one embodiment, the tri-specific antibody derived from the ProTribody construct disclosed herein comprises polypeptide A and polypeptide B, said polypeptide A and polypeptide B comprise amino acid sequences having the sequences of SEQ ID NOs: 180 and 177 (Tribody IM1062).

[0715] In one embodiment, the precursor tri-specific antibody constructs disclosed herein comprise a binding region having 2 scFv connected in tandem. Such constructs comprise polypeptide A and polypeptide B, said polypeptide A and polypeptide B comprise amino acid sequences having the sequences of SEQ ID NOs: 248 and 177; SEQ ID NOs: 249 and 177; SEQ ID NOs: 248 and 392; SEQ ID NOs: 249 and 392; SEQ ID NOs: 250 and 399; or SEQ ID NOs: 251 and 399. In another embodiment, the tri-specific antibodies derived from the ProTribody constructs disclosed herein comprise a binding region having 2 scFv connected in tandem. Such constructs comprise polypeptide A and polypeptide B, having the sequences of SEQ ID NOs: 246 and 177, or SEQ ID NOs: 247 and 358.

[0716] In one embodiment, the precursor tri-specific antibody constructs disclosed herein comprise a first binding domain binding to a TAA, a second binding domain comprises a cytokine receptor engager, and a third binding domain binding to T cell surface antigen CD3. Examples of TAA include, but are not limited to, 5T4, ROR1, EGFR, FcγRI, FcγRIIa FcγRIIb FcγRIIIa FcγRIIIb, CD28, CD137, CTLA-4, FAS, fibroblast growth factor receptor 1 (FGFR1), FGFR2, FGFR3, FGFR4, glucocorticoid-induced TNFR-related (GITR) protein, lymphotoxin-beta receptor (LTβR), toll-like receptors (TLR), tumor necrosis factor-related apoptosis-inducing ligand-receptor 1 (TRAIL receptor 1), TRAIL receptor 2, prostate-specific membrane antigen (PSMA) protein, prostate stem cell antigen (PSCA) protein, tumor-associated protein carbonic anhydrase IX (CAIX), epidermal growth factor receptor 1 (EGFR1), EGFRvIII, human epidermal growth factor receptor 2 (Her2/neu; Erb2), ErbB3 (HER3), Folate receptor, ephrin receptors, PDGFRa, ErbB-2, CD20, CD22, CD30, CD33, CD40, CD37, CD38, CD70, CD74, CD56, CD40), CD80, CD86, CD2, p53, cMet (tyrosine-protein kinase Met) (hepatocyte growth factor receptor) (HGFR), MAGE-A1, MAGE-A2, MAGE-A3, MAGE-A4, MAGE-A6, MAGE-A10, MAGE-A12, BAGE, DAM-6, DAM -10, GAGE-1, GAGE-2, GAGE-8, GAGE-3, GAGE -4, GAGE-5, GAGE-6, GAGE-7B, NA88-A, NY-ESO-1, BRCA1, BRCA2, MART-1, MC1R, Gp100, PSA, PSM, Tyrosinase, Wilms’ tumor antigen (WT1), TRP-1, TRP-2, ART-4, CAMEL, Cyp-B, hTERT, hTRT, iCE, MUC1, MUC2, P-cadherin, Myostatin (GDF8), Cripto (TDGF1), MUC5AC, PRAME, P15, RU1, RU2, SART-1, SART-3, WT1, AFP, β-catenin/m, Caspase-8/m, CDK-4/m, ELF2M, GnT-V, G250, HSP70-2M, HST-2, KIAA0205, MUM-1, MUM-2, MUM-3, Myosin/m, RAGE, SART-2, TRP-2/INT2, 707-AP, Annexin II, CDC27/m, TPI/mbcr-abl, ETV6/AML, LDLR/FUT, Pml/RARα, TEL/AML1, CD28, CD137, CanAg, Mesothelin, DR5, PD-1, PD1L, IGF-1R, CXCR4, Neuropilin 1, Glypicans, EphA2, CD138, B7-H3, B7-H4, gpA33, GPC3, SSTR2, or VEGF-R2

[0717] In one embodiment, examples of NK cell surface antigens recognized by the precursor tri-specific antibody constructs disclosed herein include, but are not limited to, NKG2A, NKG2D, CD16, NKp46, CD16a (FcγRIIIa), CD56, sMICA/B, ILT, SLAMF7, NKp44, NKp30, DNAM-1, NKG2C/CD94, KIR2/DL3, KIR2DL1, NKRP1, NKG2E/CD94, NKG2F/CD94, CD69, LLT1, ILT2, AICL, CD26, NKp80, KIR family receptors, or CD122/IL-2Rbeta.

[0718] In one embodiment, the precursor tri-specific antibody constructs disclosed herein comprise a cytokine receptor engager such as IL-15, IL-2, IL-12, TNF-alpha, IL-6, TGF-beta, IL-10, IL-8, IL-17, IL-21, INF, or VEGF.

[0719] In one embodiment, for any precursor tri-specific antibody constructs disclosed above, the third binding domain comprises a Fab region comprising a heavy chain polypeptide and a light chain polypeptide, said heavy chain polypeptide comprises a heavy chain variable region and a heavy chain constant region (VH-CH), said light chain polypeptide comprises a light chain variable region and a light chain constant region (VL-CL), wherein when said first binding domain is located C-terminally to said VL-CL region, said second binding domain is located C-terminally to said VH-CH region, or when said first binding domain is located C-terminally to said VH-CH region, said second binding domain is located C-terminally to said VL-CL region. In some embodiments for the precursor tri-specific antibody constructs disclosed above, a single regulatory domain comprising a protease cleavage domain, a half-life prolonging (HLP) domain, and a CAP component is located N-terminally to said VH region or to said VL region of said third binding domain.

[0720] In one embodiment, the present disclosure provides a pharmaceutical composition comprising a precursor tri-specific antibody construct disclosed herein, and a pharmaceutically acceptable carrier.

[0721] In one embodiment, the present disclosure provides a nucleic acid construct comprising one or more nucleic acid sequences, said sequences encoding a precursor tri-specific antibody construct disclosed herein. In one embodiment, the present disclosure provides an expression vector comprising such nucleic acid construct.

[0722] In one embodiment, the present disclosure provides a method of treating, preventing, or delaying disease progression, reducing tumor load, or reducing the incidence of a cancer or a tumor, or any combination thereof, in a subject in need of such treatment, comprising a step of administering to the subject a pharmaceutical composition comprising the precursor tri-specific antibody constructs disclosed herein. In one embodiment, the cancer or tumor comprises a solid tumor or non-solid tumor, or the cancer or tumor comprises a metastasis of a cancer or tumor.

[0723] While certain features of the precursor tribody constructs have been illustrated and described herein, many modifications, substitutions, changes, and equivalents will now occur to those of ordinary skill in the art. It is, therefore, to be understood that the appended claims are intended to cover all such modifications and changes as fall within the true spirit of these precursor constructs.

### EXAMPLE 1

### Expression and Purification of Tribody and ProTribody Antibody Constructs

[0724] Objective: To express and purify a cleaved precursor trispecific antibody, a non-cleaved precursor trispecific antibody, and a trispecific antibody construct.

[0725] Methods: Gene Synthesis And Plasmid Construction. The coding sequences for the heavy chain (HC) and light chain (LC) of the precursor bispecific antibody were generated by DNA synthesis and PCR, subsequently subcloned into pCDNA3.4-based plasmid (Invitrogen) for protein expression in mammalian cell system. Finally, the gene sequences in the expression vectors were confirmed by DNA sequencing.

[0726] Expression of Trispecific Antibody Construct. Transient expression of the Tribody/ProTribody antibodies was performed by co-transfection of paired HC and LC constructs (at 1:1 HC/LC ratio for the Tribody format or 2.5:1 HC/LC ratio for the ProTribody format) into CHO cells using PEI method. Briefly, 1 L of CHO cells at approximately 5.5×10⁶/ml in a 3 L shake flask was used as the host, Transfection was initiated by adding a mixture of 1 mg of total DNA and 4 mg PEI in 100 ml OptiMEM medium (Invitrogen) to the cells and gentle mixing. Cells were then cultured in an incubator shaker at 120 rpm, 37° C., and 8% CO2, for 8-10 days. Feeding with peptone and glucose was carried out 24 h later and every 2-3 days thereafter depending on the cell density and viability. The cell culture was terminated on day 8-10 when cell viability reduced to <80%. The conditioned medium was harvested for protein purification.

[0727] Purification of Trispecific Antibody Construct. Protein purification by affinity chromatography and SEC was performed using an AKTA pure instrument (GE Lifesciences). Affinity capture of the tribody was achieved by passing the harvested supernatants over a column of CaptureSelect™ CH1-XL Affinity Matrix (Thermo Scientific). After washing column with Buffer A (25 mM Tris, 150 mM NaCl, 5 mM EDTA, pH 7.5), the protein was eluted with Buffer B (50 mM Sodium citrate, 150 mM NaCl, pH 3.0), and immediately neutralized with ⅙ volume of Buffer D (1 M Aarginine, 400 mM Succinic acid, pH 9.0). The affinity purified protein was then concentrated to 5-10 mg/ml using Amicon 30 kD concentrator (Merck Millipore) and subjected to SEC purification on a Superdex200 column (GE Lifesciences) equilibrated with SEC Buffer: 200 mM Arginine, 137 mM Succinic acid, 0.05%Tween-80,150 mM NaCl, pH5.0. The target tribody fractions were collected, then added 5% trehalose (146 mM). The target tribody will be analysized using SDS-PAGE and HPLC-SEC.

[0728] SDS-PAGE Analysis of Trispecific Antibody Construct. SDS-PAGE analysis of tribody was carried out under reducing and non-reducing conditions in pre-cast polyacrylamide gels. Briefly, 2 ug tribody samples were mixed by NuPAGE™ LDS sample buffer (thermofisher-NP0008) with 70 mM DTT add or not. After incubating at 25° C. or 90° C. for 10 min, the samples and Unstained Protein Standards (BIO RAD-161-0363 were loaded onto the gels. Electrophoresis was carried out at a constant voltage of 120 V with 1× Tris-glycine-SDS running buffer. Following electrophoresis, gels were stained for overnight using Coomassie blue and de-stained with destaining solution (10% acetic acid, 40% methanol and 50% water). Destained gels were scanned with a Gel imaging system (Tanon-2500R).

[0729] SEC-HPLC Analysis of Precursor Trispecific Antibody Construct. Analytical SEC-HPLC was performed using Shimadzu LC-10 HPLC instrument (Shimadzu Corp.). 20µl sample on 1 mg/ml will be loaded to a Superdex 200 Increase 5/150 GL column (GE Lifesciences). The mobile phase was 2*PBS with a flow rate of 0.3 ml/min, 15 min.

[0730] LC-MS Analysis of Tribody Construct. The Tribody was separated with ACQUITY UPLC BEH200 Å, SEC column (Waters 1.7 µm, 4.6x 300 mm) at room temperature and detected by ESI-MS(Thermo, MS-B20-03). The mobile phase was 0.1% formic acid: acetonitrile (75:25, v/v) with a flow rate of 0.2 mL/min. Mass spectrometry was performed in the positive ion. Other parameters for mass spectrometry were: resolution of 17500, Scan range of 1000-5000 m/z, In-source CID of 60 eV, sheath gas flow rate of 30 L/min, capillary temperature of 350° C., Spray voltage of 2.5 KV.

[0731] Results: The expressed HC and LC Tribody constructs associate to form a single molecule, as indicated by the single ~100 kDA band observed in the SDS-PAGE, and by a single major peak at retention time of ~5.6 min in SEC-HPLC (FIGS. 38A and 38B, respectively). The expressed HC and LC of the ProTribody cleaved/non-cleaved trispecific antibody construct produced a ~180 kDA band in SDS-PAGE, and a major peak at retention time of ~4.9 min in SEC-HPLC (FIGS. 39A and 39B, respectively). These results are in agreement with the expected retention time of the expected Mw based on mass calibration curve.

[0732] MS analysis of the Tribody constructs confirmed a 49.5 kDa pick for the LC, a 52 kD pick for the HC and 102 kDa for the intact protein (FIGS. 40A-C, respectively). MS analysis of the ProTribody constructs confirmed a 49.5 kDa pick for the LC and a 123.5 kD pick for the HC (FIGS. 41A-B, respectively).

[0733] Conclusion: a Trispecific Tribody and ProTribody format constructs can be successfully expressed and purified.

### EXAMPLE 2

### Protease Cleavage Assay of ProTribody Products

[0734] Objective: To validate in vitro the cleavage of the purified ProTribody formats by specific proteases.

[0735] Methods: Conversion of the ProTribody variants to the active activated formats was performed by recombinant Human proteases (R&D Systems). Briefly, The ProTribody with multiple cleavage sites MC2 and MC3 (MMP-9 and uPA/ MMP-9, Matriptase and uPA respectively) as well as the non-cleavable (NC) format were digested by different protease separately on R.T. overnight. The MMP-9 cleavage assay were carried out in 50 mM Tris,10 mM CaCl₂, 150 mM NaCl, 0.05%(w/v) Brij-35,pH7.5, and the mass ratio of MMP-9 to tribody is 100:1. For the uPA cleavage assay, the assay buffer is 50 mM Tris, 0.01%(v/v)Tween20,pH8.5, and the mass ratio of uPA to tribody is 100:1. The assay buffer for Matriptase cleavage assay is 50 mM Tris, 50 mM NaCl, 0.01%(v/v)Tween20, pH9.0 and the mass ratio of Matriptase to tribody is 1000:1. The cleavage products were detected by SDS-PAGE.

[0736] Results: The cleavable ProTribody variants (IM-1188, IM-1184) as well as the non-cleavable Protribody format (IM-1193) were treated with the respective proteases and 1ug was loaded on 4-20% SDS-PAGE. In non-reduced conditions (FIG. 42A), IM-1188 Matriptase treated, MMP-9 treated and uPA treated (FIG. 42A, lanes 3,4,5, respectively) revealed the cleaved formats at the expected bands size of ~130 kDa +50 kDa, while in the untreated (lane2 FIG. 42A) an expected ~180 kDa is observed. Similarly, IM-1184 MMP-9 treated and uPA treated (FIG. 42A, lanes 11,12, respectively) indicate for the cleaved formats at the expected bands size of ~130 kDa +50 kDa while in the untreated (lane13 FIG. 42A) an expected band of ~180 kDa is observed. IM-1193 untreated, Matriptase treated, MMP-9 treated and uPA treated (FIG. 42A, lanes 6,7,8,9, respectively) revealed an expected band of ~180 kDa, indicating for uncleavable product.

[0737] In reduced conditions (FIG. 42B) IM-1188 Matriptase treated, MMP-9 treated and uPA treated (FIG. 54 lanes 3,4,5, respectively) revealed the cleaved formats at the expected bands size of ~70 kDa+50+60 kDa, while in the untreated (lane2 FIG. 42B) expected bands of -50+130 kDa are observed. Similarly, IM-1184 MMP-9 treated and uPA treated (FIG. 42B, lanes 11,12, respectively) indicate for the cleaved formats at the expected bands size of ~70 kDa+50+60 kDa, while in the untreated (lane13 FIG. 42B) expected bands of ~50 kDa+130 kDa are observed. IM-1193 untreated, Matriptase treated, MMP-9 treated and uPA treated (FIG. 42B, lanes 6,7,8,9, respectively) revealed the expected bands of ~50 kDa+130 kDa.

[0738] Conclusion: Cleavable formats can be successfully cleaved in vitro by the respective proteases, and a non-cleavable format is not cleaved by the same proteases.

### EXAMPLE 3

### Binding of Tribody and ProTribody Antibody Constructs to Recombinant Proteins by ELISA

[0739] Objective: To study the binding efficacy of a variety of Tribody/ProTribody antibody constructs that binds by the TAA ScFv domain (5T4), by the Tcell engager domain (anti CD3ε Fab), and by the NK engager domain (anti NKG2A/ anti NKG2D) to 5T4, CD3ε and NKG2A recombinant proteins, respectively by ELISA. The various formats may be comprised of a CAP masking sequences, a cleavable linker, a non-cleavable linker, as well as a point-mutated engager sequences that are lack of binding activity to the specific engager and serve as negative controls for the Tribody/Protribody formats.

[0740] Methods: ELISA binding of Tribody/ProTribody antibody constructs to antigens: Dilute target protein (hCD3epsilon-His (cat # 10977-H08S, supplier Sino Biological); h5T4-His (cat# 19845-H08H, supplier Sino Biological); NKG2A-CD94-ECD-hFc, Lot:20200724002, provided by CP; or NKG2D-ECD-hFc, Lot: 20200413002, provided by CP) into PBS with final concentration of 0.01 µg/mL for hCD3epsilon-His, 0.3 µg/mL for h5T4-His, 1 µg/mL for NKG2A-CD94-ECD-hFc and 0.7 µg/mL for hNKG2D-ECD-hFc respectively and coat 100 µL/well on ELISA plate (cat: 9018, supplier Corning) respectively. Incubate O/N, 4° C. The plates were blocked with 250 µL 1% BSA in PBST for 1 hr at 37° C.Wash 4 times with PBST. All the washes are done using Biotek (Elx 405). All the Tribody set antibodies were diluted to 400 nM and make 4-fold serially dilutions (12 points, including 0 point). Add 100 µL/well diluted antibody constructs solution to plate, incubate for 1 hr at 37° C.Wash 4 times with PBST. Add 100 µL/well anti-human kappa light chain-HRP (1:10000), incubate for 0.5 hr at 37° C. Wash 4 times with PBST. 100 µL/well of TMB substrate was added and incubated at room temperature for 5 min. 100 µL/well of 1N HCl to terminate reaction. Plates were read using ELISA plate reader at 450 nm wavelength (instrunet SpectraMax M5e). Data Analysis was performed using Graphpad prism 5 software by using nonlinear regression (curve fit): log (agonist) vs. response, agonist is antibody concentration (nM) and response is OD value.

[0741] Results: The expressed trispecific constructs were analyzed for their binding to CD3ε, to 5T4 and to NKG2A/NKG2D. The binding EC50 to human CD3ε was of 1.69 nM for the IM-1062 (circles) and 1.84 nM for IM-1093 NKG2A mutant variant (squares), while no binding observed for IM-1153 CD3 mutant variant (triangles), as expected (FIG. 43A). The EC50 to human 5T4 was of 45 nM for the IM-1062 (circles), 12 nM for IM-1093 NKG2A mutant variant (squares), and 31 nM for IM-1153 CD3 mutant variant (triangles) (FIG. 43B). The EC50 to human NKG2A was of 4.4 nM for the IM-1062 (circles) and 2.1 nM for IM-1153 CD3 mutant variant (squares), while no binding observed for IM-1093 NKG2A mutant variant(triangles), as expected (FIG. 43C). The EC50 to human NKG2A tested with the bi-NKG2A scFv Tribodies variants that harbors two anti NKG2A scFv in tandem, was of 0.2 nM for the IM-1272 (circles) and 0.1 nM for IM-1273 CD3 mutant variant (squares), while 5.7 nM was observed for IM-1062 (triangles), suggesting ~60-fold improved binding affinities for the double-ScFv NKG2A arm. (FIG. 43D).

[0742] Conclusion: As shown in FIGS. 43A-D, the binding of the Tribody format was confirmed in each of the Tribody arms. The Tribody format that harbors point mutations in the NKG2A arm (IM-1093) lack binding to the NKG2A antigen as expected, while maintaining the binding of the other structural arms to the respective proteins (5T4 and CD3ε). Similar data is observed on the NKG2D mutant variant (IM-1091, data not shown). The Tribody format that harbors point mutations in the CD3ε CDR domain arm (IM-1153) lack binding to the CD3ε antigen protein as expected, while maintaining the binding of the other arms to the respective proteins (5T4 and NKG2A). Similar data is observed on additional version of CD3ε mutant variant where other mutations were introduced into the CDRs, which lacks biding (IM-1155, data not shown). In addition, the Tribody format that harbors two anti NKG2A scFv in tandem exhibited ~60-fold higher binding affinities to NKG2A than the single scFv.

[0743] Results: EC50 of 1.7 nM for the MMP-9 cleaved IM-1184 construct (squares) and 2.2 nM for the uPA cleaved IM-1184 construct (triangles up) binding to recombinant hCD3ε protein were observed, while no binding of the un-cleaved IM-1184 construct (circles) as expected (FIG. 44A). EC50 of 0.9 nM for the MMP-9 cleaved IM-1188 construct (squares), 2.1 nM for the uPA cleaved IM-1188 construct (triangles up) and 1.9 nM for the Matriptase cleaved IM-1188 construct (triangles down) binding to recombinant hCD3ε protein were observed, while no binding of the un-cleaved IM-1188 construct (circles) as expected (FIG. 44B). Almost no binding was detected for the non-cleavable ProTribody format (IM-1193) as expected (FIG. 44C).

[0744] As shown in FIGS. 44A-C, binding to human CD3ε is influenced by the presence or absence of a CAP and serum half-life prolonging (HLP) moiety elements. Absence of a CAP in the Tribody construct (IM-1062) or in the cleaved ProTribody results in increased binding affinity compared to the either non-cleaved ProTribody constructs or the non-cleavable construct (IM-1193). The results demonstrate regulatory binding of ProTribody constructs (IM-1184, IM-1188 and IM-1193) to human CD3ε, wherein the incubation of cleavable ProTribody constructs (IM-1184 and IM-1188) with each of the proteases leads to increased affinity of the CAP-removed structure with the CD3ε antigen . A similar increase in affinity was not observed in the construct having a non-cleavable linker (ProTribody-NC, IM-1193) incubated with the same proteases.

[0745] The Tribody construct and the cleaved ProTribody constructs have a relatively similar binding affinity to CD3ε by ELISA, while un-cleaved ProTribody constructs as well as non-cleavable Protribody format in the presence of proteases were shown dramatically reduced binding to CD3e.

[0746] Conclusion: ProTriBody variants having the CAP-HLP masking fused lack binding to CD3e, while constructs lacking a CAP element showed increased binding. Binding affinity to CD3ε of ProTribody constructs could be regulated by incubation with proteases, wherein incubation of a cleavable ProTribody construct in the presence of protease result with a significant increase in binding affinity of the construct. Protease-cleaved ProTribody has restored CD3ε binding.

### EXAMPLE 4

### Binding of Trispecific Antibody Constructs to Cells

[0747] Objective: To study the binding efficacy of a variety of Tribody/ProTribody antibody constructs that binds by the TAA ScFv domain (5T4), by the Tcell engager domain (anti CD3ε Fab), and by the NK engager domain (anti NKG2A/anti NKG2D) to cells expressing membrane bound endogenous 5T4, CD3ε and NKG2A/NKG2D proteins, respectively, as well as ectopic expression in CHO cells over expressing 5T4, CD3ε and NKG2A/NKG2D proteins, respectively, by FACS. Specifically, to study the binding efficacy of Tribody (IM-1062, IM-1093 and IM-1153), to Jurkat T-cell line (CD3ε), NCI-H226 (5T4), NK92 cell line (NKG2A) and to CHO cells over expressing either 5T4 or NKG2A proteins. In addition to study the binding efficacy of the ProTribody (cleavable and non-cleavable formats (IM-1184/IM-1188 and IM-1193, respectively) to Jurkat Tcell line (CD3ε). The various formats may be comprised of a CAP masking sequences, a cleavable linker, a non-cleavable linker, as well as a point-mutated engager sequences that are lack of binding activity to the specific engager and serve as negative controls for the Tribody/Protribody formats.

[0748] Methods: FACS binding of Tribody/ProTribody antibody constructs to cells

[0749] Suspension cultured cells was harvested directly, and adherent cell were digested using TrypLE Express Enzyme (cat: 12604-013, supplier Life technologies). Centrifuge at 1000 rpm for 5 min and discard the supernatant. Cells are suspended at a concentration of 2×10⁶/mL in FACS buffer (2% FBS in PBS) and add 100 µL/well of cell suspension to the plate (cat #3799, supplier Corning). Centrifuging the plates at 2000 rpm for 5 min and discard the supernatant. Re-suspend the cells in 100 µL/well of Tribody set antibodies (400 nM start, 4-fold dilution, 8 point including 0 point) and incubate the plate for 60 min at 4° C. Centrifuge the plate at 2000 rpm, 4° C. for 5 min and discard supernatant. Then wash the cells 3 times with 170 µL FACS buffer. Re-suspend the cells at 100 µL/well with secondary antibody (goat anti-human Ig Fab-FITC, Cat # 2085-02, Southern biotech) with 1:400 dilution and incubate the plate for 30 min at 4° C. in dark. Centrifuge the plate at 2000 rpm, 4° C. for 5 min and discard supernatant. Then wash the cells 3 times with FACS buffer and analyze the sample with FACS verse. The fluorescence intensity of the staining was measured using flow cytometer (BD, FACSVerse). The geometric mean fluorescence intensity (GMFI; median fluorescence intensity (MFI)) of set antibodies staining was calculated (BD FACSuite software). Dose-response curves were generated and EC50s for thetrispecific variants binding were calculated using GraphPad Prism software.

[0750] Results: The expressed trispecific constructs were analyzed for their binding to cells expressing endogenous CD3ε, 5T4 and NKG2A/NKG2D. The binding EC50 to Jurkat Tcells expressing endogenous hCD3ε was 1.1 nM for the IM-1062 (circles) and 1.3 nM for IM-1093 NKG2A mutant variant (squares), while no binding observed for IM-1153 CD3 mutant variant (rhombus), as expected (FIG. 45A). The EC50 to NCI-H226 cell line expressing endogenous 5T4 was of 1.78 nM for the IM-1062 (circles), and 1.64 nM for IM-1063 variant (squares) (FIG. 45B). The EC50 to NK92 cell line expressing endogenous NKG2A was 6.5 nM for the IM-1062 (circle) and 3.7 nM for IM-1153 CD3 mutant variant (rhombus), while no binding observed for IM-1093 NKG2A mutant variant (squares), as expected (FIG. 45C). The EC50 to CHO cell line over expressing ectopic 5T4 was of 0.9 nM for the IM-1062 (circles), and 1.3 nM for IM-1093 variant (squares) and 1.33 nM for the IM-1153 CD3 mutant variant (rhombus) (FIG. 45D). The EC50 to CHO cell line over expressing ectopic NKG2A was 29 nM for the IM-1062 (circle) and 3 nM for IM-1153 CD3 mutant variant (rhombus), while no binding observed for IM-1093 NKG2A mutant variant (squares), as expected (FIG. 45E). The EC50 to CHO cells over expressing human NKG2A tested with the bi-NKG2A scFv Tribody variants that harbor two anti NKG2A scFv in tandem, was of 0.4 nM for the IM-1272 (circles) and 0.2 nM for IM-1273 CD3 mutant variant (squares), while 16 nM was observed for IM-1062 (rhombus), suggesting ~80-fold improved binding affinities for the double-ScFv NKG2A arm. (FIG. 45F).

[0751] Conclusion: As shown in FIGS. 45A-F, the binding of the Tribody format to cell membrane bound form was confirmed in each of the Tribody arms. The Tribody format that harbors point mutations in the NKG2A arm (IM-1093) lack binding to the NKG2A-expressing cells as expected, while maintaining the binding of the other arms to the respective expressing receptors (5T4 and CD3ε). Similar data is observed on the NKG2D mutant variant (IM-1091, data not shown). The Tribody format that harbors point mutations in the CD3ε arm (IM-1153) lack binding to the CD3ε expressing cells as expected, while maintaining the binding of the other arms to the respective expressing receptors (5T4 and NKG2A). Similar data is observed on additional version of CD3ε mutant variant (IM-1155, data not shown). In addition, the Tribody format that harbors two scFv anti NKG2A in tandem exhibited higher binding affinities to cells expressing NKG2A than the single scFv.

[0752] Results: Binding of the uPA cleaved IM-1184 construct (triangles up) to Jurkat cells was observed, with lower efficacy than the IM-1062 Tribody, while no binding of the un-cleaved IM-1184 construct (circles) as expected (FIG. 46A). Similarly, binding of the uPA cleaved IM-1188 construct (triangles up) and the Matriptase cleaved IM-1188 construct (triangles down) to Jurkat cells was observed, while lower binding of the un-cleaved IM-1188 construct (circles) as expected (FIG. 46B). Almost no binding is detected for the non-cleavable ProTribody format (IM-1193) as expected (FIG. 46C).

[0753] Conclusion: The ProTribody formats were analyzed for their ability to bind to tumor cells expressing CD3 epsilon (Jurkat T cells). The cleaved cleavable ProTribody formats had significantly increased affinity to Jurkat cells as compared to the non-cleaved ProTriboby formats. Constructs lacking a CAP-HLP element showed increased binding. Binding affinity to CD3ε of ProTribody constructs could be regulated by incubation with proteases, wherein incubation of a cleavable ProTribody construct in the presence of protease result with significant increased binding affinity of the construct. Protease-cleaved ProTribody has restored CD3ε binding.

### EXAMPLE 5

### In Vitro Functional Evaluation of Tribody and ProTribody Antibody Constructs

[0754] Objective: To evaluate in vitro, dose dependent T-cell/PBMCs mediated cytotoxicity of Tribody/ProTribody variants of colon, breast, lung cancer cells (HCT116, MDA-MB-231, NCI-H226 and A549, respectively).

[0755] Methods: Lactate Dehydrogenase (LDH) Cytotoxicity Assay: Tribody and ProTribody variants were analyzed for their potential to induce Tcells/PBMCs cell-mediated cytotoxicity in 5T4 expressing cancer cells. Briefly, Isolate T cell using EasySep Human T Cell Isolation Kit (STEMCELL, Cat: 17951). Adjust concentration of target cell to 2×10⁵/mL in assay buffer (blank RPMI 1640, Gibco, Cat-10491 plus 5%FBS), and add 50 µL to wells of a round-bottom 96-well plate (Cat-3799, Corning). Adjust concentration of effect cell (Isolated T cells or PBMCs from ALLCELLS) to 2E6/mL in assay buffer, and add 50 µL to wells with ET ratio of 10:1. Then add 100 µL/well of 2-fold diluted antibodies, mix sufficiently. Incubate at 37° C., 5% CO₂ for 24 hr. Centrifuge the plate at 300 g for 5 min and collect supernatant. LDH release would be tested by CytoTox 96 Non-radioactive cytotoxicity assay kit (Promega, G1780). Add 20 µL lysis solution (10*) to max well, mix sufficiently and incubate at 37° C. for 45 min. Then transfer 50 µL aliquots from all test and control wells to a fresh 96-well flat clear bottom plate (Cat-3599, Corning). Add 50 µL CytoTox reagent to each well. Protect plates from light and incubate for 30 min at room temperature. Finally add 50 µL Stop Solution to each well of the 96-well plate. Record the absorbance at 490 nm or 492 nm within 1 hr after adding the Stop Solution. The result of Calculation is %Cytotoxicity = (Experimental - E only - T only)/ (T Max - T only) ×100). The EC50 values were measured using GraphPad Prism software.

[0756] DELFIA Assay. LCL721.221 cells were induced by loading 1.0 mM peptide (GL Biochem, cat-217445) and incubate at 26° C. O/N. Label LCL721.221 cells with fluorescence enhancing ligand (DELFIA BATDA Reagent, Perkin Elmer, cat: AD0116), incubate at 37° C. for 20 min. Re-suspend the LCL721.221 pellet in RPMI 1640 plus 5% FBS and 1 mM peptide at a concentration of 1×105 cells/mL after 3 times of washing by PBS. NK92 cells was re-suspended at a concentration of 2×106 cells/mL in assay buffer (RPMI 1640 containing 5% FBS plus 10 ng/mL IL-2). Serially dilute antibody in assay buffer and add 50 µL (4*) diluted antibodies to assay plate (Cat-3599, Corning). Add 50 µL NK92 cell suspension to the plate and incubate with antibodies for 0.5 hr. And then add 100 µL labeled LCL721.221 cell suspension to the plate, mix sufficiently and incubate for 2-4 hrs at 37° C. Add 10 µL of Lysis Buffer to the maximum release well. Centrifuge the plate for 5 min at 500 g. Transfer 25 µL supernatant to a flat-bottom detection plate. Add 200 µL Europium Solution and shake the plate at 250 rpm for 15 min at room temperature. Measure fluorescence in a time-resolved fluorometer within 5 hrs.

[0757] PBMCs Mediated Cytotoxicity Assay Using Annexin V Apoptosis Marker. PBMCs were thawed and allowed to rest in growth medium for 18h in 37C prior to assay beginning. On the day of the assay A549 cells (Target) were trypsinized and stained with CFSE. CFSE-stained cells were seeded 50,000 cells per well in 96-well plate in triplicates. Then, 500,000 PBMCs were added to each well with target cells (E:T ratio of 10:1). Subsequently, test items 1062, 1093 and 1153 at 6 concentrations (10 nM, 1 nM, 0.1 nM, 0.01 nM, 0.001 nM and 0.0001 nM) wad added. PBS was used as vehicle control. The co-culture was incubated for 24 h at 37C 5% CO2. PBMCs from healthy donor was used. After the incubation period, conditioned media were collected and frozen. Annexin V staining was performed, and cells were analyzed by flow cytometry using CytoFLEX instrument.

[0758] PBMCs Mediated Cytotoxicity Assay Using Incucyte Live Imaging on GFP Labeled Cells. Abs diluents were prepared using 96 V plate. Seed MDA-MB-231-GFP to greiner-655090 plate,100 ul/well. Cells were counted before seeding. Add Ab to target cells, 20ul/well.Final Ab buffer concentration in total media is 2% only for the top dose. Seed effeft cells,100 ul/well(NK from isolation of fresh PBMC, NK:target cells=3:1),1 donor;NK media must be change to EMEM. Plate was analyzed in IncucyteS3 incubator every 2 hrs.

[0759] IFNy secretion. Supernatants analysis from the PBMC LDH cytotoxicity assay were analyzed for IFNg levels by ELISA. IFN-gamma was measured according to the protocol of Human INF gamma DuoSet ELISA kit (R&D, DY285). In brief, coat the Capture Antibody with the working concentration in PBS onto a 96-well microplate (Cat-9018, Corning), incubate overnight at RT. After the three times of wash, block plates with 300 µL of Reagent Diluent (1%BSA in PBS) for at least 1 hr at RT. After the three times of wash, add 100 µL sample with proper dilution or standards in Reagent Diluent, and incubate for 2 hrs at RT. After the three times of wash, add 100 µL diluted Detection Antibody, and incubate for 2 hrs at RT. After the three times of wash, add 100 µL of the working dilution of Streptavidin-HRP B, and incubate for 20 min at RT. After the three times of wash, add 100 µL of Substrate Solution, and incubate for 20 min at RT. Add 50 µL of Stop Solution. Read the OD450 using a microplate reader (Molecular Device, cat: Spectra Max M5e).

[0760] Receptor-Ligand Blocking (RBA) Assay. Competitive FACS based RBA: 1.3×105/well of CHOK1-NKG2A-CD94 cells were put into 96-well round-bottom polystyrene plates. After centrifuging the plates at 2000 rpm for 5 min, discard the supernatant. Re-suspend the cells with 50 µL diluted antibodies solution and incubate the plates at 4° C. for 0.5 hr, then add 50 µL/well HLA-E PE (1:2000) into plate, mix and incubate the plates at 4° C. for 2.5 hrs. Centrifuge the plate at 2000 rpm, 4° C. for 5 min and discard supernatant. Then wash the cells 3 times with FACS buffer and analyze the sample with FACS verse.

[0761] Results: Using lactate dehydrogenase assay, ~60% T cells mediated cytotoxicity was achieved with EC50 of 0.054 nM for IM-1062 Tribody (triangles up) and 0.144 nM for IM-1093 Tribody NKG2A mutated format (triangles down), while no cytotoxicity for the CD3-mutated Tribody variants IM-1153 and IM-1154 (circles and squares, respectively) in NCI-H226 lung cancer cells (FIG. 47A).

[0762] Using DELIFIA assay, ~40% NK mediated cytotoxicity was achieved at >100 nM concentration in the presence of IM-1062 Tribody (circles), while no activity of the NKG2A mutated form, IM-1093 (squares) in breast LCL721.221 cancer cells (FIG. 47B).

[0763] In PBMCs mediated cytotoxicity assay performed on CFSE labeled A549 cells using Annexin V, ~85% cell cytotoxicity was observed with EC50 of 0.0036 nM for IM-1062 Tribody (circles) and 0.0662 nM for IM-1093 Tribody NKG2A mutated variant (squares), while no cytotoxicity for the CD3mutated Tribody variant IM-1153 (triangles) in A549 lung cancer cells (FIG. 47C).

[0764] In PBMCs mediated cytotoxicity assay performed on GFP-MDA-MB231 cells, using Incucyte live cell imaging, maximum of ~70% killing was observed at 1pM following 36 hrs in the presence of for IM-1062 Tribody (circles) and ~30% killing for IM-1093 Tribody NKG2A mutated variant (squares), while no cytotoxicity for the CD3mutated Tribody variant, IM-1153 (triangles) (FIG. 47D, left). At higher Ab concentration of 100 nM, maximum of >85% killing was observed following 36 hrs in the presence of for IM-1062 Tribody (circles) and IM-1093 Tribody NKG2A mutated variant (squares), while at 100 nM, ~30% cytotoxicity with maximum of ~70% cytotoxicity over time for the CD3mutated Tribody variant IM-1153 (triangles) (FIG. 47D, middle). Similar performance was observed at 0.1 nM for IM-1062 and IM093 suggesting saturating conditions (data not shown). These findings were also observed when using HCT116-GFP expressing cells as the target cells (data not shown).

[0765] In PBMCs mediated cytotoxicity assay performed on GFP-MDA-MB231 cells, the ProTribody formats IM-1184, IM-1188 and IM-1193 exhibited ~15%, ~25% and ~10% cytotoxicity, respectively, following 40 hrs, as compared to the Tribody IM-1062 that exhibited ~90% cytotoxicity (FIG. 47D, right). No activity was observed at lower Abs concentrations of 10 pM, 1 pM and 0.1 pM (data not shown).

[0766] Supernatants from the PBMCs mediated cytotoxicity assay were analyzed for IFNg levels upon Tribody IM-1062 treatment. Tribody IM-1062 induce IFNg secretion in a dose dependent manner (10 nM,1 nM, 0.1 nM, 0.01 nM, 0 nM; left to right, respectively) in NCI-H226, HCT116, and MDA-MB-231 target cell lines co-cultured with PBMCs effector cells (FIG. 48). Similar pattern was also observed in the supernatants derived from the PBMCs mediated cytotoxicity assay using Annexin V apoptosis marker using A549 target cells (data not shown).

[0767] Various Tribody variants IM-1062, IM-1153 and IM-1155 (CD3 mutant variants) as well as IM-1093 (NKG2A mutant variant) were analyzed for their ability to block NKG2A-HLA interaction. The inhibition rate of IM-1062 (squares), IM-1153(triangles up), IM-1155 (rhombus) and IM-1093 (triangles down) measured as IC50 of 29 nM, 18 nM and 60 nM, respectively, while no inhibition activity was observed in the IM-1093 NKG2A mutated variant (FIG. 49).

[0768] Conclusion: In T cells and PBMCs mediated cell cytotoxicity assays, various cancer cell lines were undergoing cell killing in the presence of Tribody format IM-1062 and IM1093, with higher efficacy for IM-1062. IM-1062 also induced NK cell mediated cytotoxicity as shown in FIG. 47B. The ProTribody formats had significantly reduced activity. A pronounced difference in cell killing can be observed between Tribody and ProTribody due to the un-cleaved CD3 CAP masking. In addition, IM-1062 was also shown to induce dose dependent IFNg secretion as shown in FIG. 48, as well as blocking activity for the NKG2A-HLA-E interaction, as shown in FIG. 49.

### EXAMPLE 6

### In Vivo Efficacy in Xenograft NSG Mouse Model

[0769] Objective: To examine the inhibition of tumor growth induced by the Tribody in humanized mouse model.

[0770] Methods: In-vivo xenograft assay: NOD/SCID/IL2Rγnull (NSG) Mice (Charles River Laboratory) were used in accordance with a protocol reviewed and approved by the Institutional Animal Care and User Ethical Committee. Mice were housed in sterile conditions using high-efficiency particulate arrestance filtered micro-isolators and fed with irradiated food and acidified water. Xenograft tumors were generated by SC injection of 3×10e6 cancer target cells (in 200 µl of PBS) into 6-8 weeks old mice. When tumors of ~50 mm3 were formed, PBMC cells derived from two healthy donors peripheral blood were IV injected into tail vain at E:T ratio of 3:1. When tumors of ~80-120 mm³ were formed, different Tribodies were daily IP-injected (Intraperitoneal injection). After tumor inoculation, the animals were checked daily for morbidity and mortality. At the time of routine monitoring, the animals were checked for any effects of tumor growth and treatments on normal behavior such as mobility, food and water consumption, body weight gain/loss (body weights were measured twice weekly), eye/hair, matting and any other abnormal effect. The major endpoint was the tumor take rate and the tumor growth curve. Tumor sizes were measured twice weekly in two dimensions using a caliper, and the volume expressed in mm3 using the formula: V = 0.5 (a) × (b) 2 where a and b are the long and short diameters of the tumor, respectively. Body weights were measured twice weekly.

[0771] Specifically, mice were inoculated either with MDA-MB-231 cells, A549 cells or HCT116 cells. The study included three treatment arms, IM-1062, IM-1093 and control (PBS only). Each arm was comprised of 6 animals, where 3 mice were PBMCs injected from one healthy donor and 3 mice were PBMCs injected with second healthy donor at E:T ratios of 3:1, and dosed daily with 100ug/Kg/day.

[0772] Results: FIG. 50A presents the tumor volume (mm3) for the mice treated with Tribody (IM-1062, light lower line) and the mice treated with PBS control (dark upper line). Similar observations were when treating with IM-1093, suggesting saturating conditions in this model (data not shown). FIG. 50B present tumor volume of individual mice treated with Tribody IM-1062 (left) and mice treated with PBS (right). Administration of Tribody reduced dramatically tumor size compared to the control samples and showed complete response.

[0773] In additional study administrated with A549 cells (FIG. 51A), efficacy of ~45% tumor growth inhibition (TGI) was observed in the IM-1062 Tribody treated mice (dark grey line) versus the PBS treated mice (black line), while no significant activity for the NKG2A mutated Tribody IM-1093 (light grey line). FIG. 51B demonstrate tumor volume of individual mice of PBS treated mice (left), Tribody IM1062 treated mice (middle) and IM-1093 treated mice (left). Similar observation of 47% and 55% TGI for IM-1062 in HCT116 engrafted mice and NCI-H226 engrafted NCG mice, respectively (data not shown). Tumors were further dissected, and cells were dissociated for immune phenotyping. FIG. 52 presents % immune cells population in the tumor microenvironment (TME), with significantly higher %CD45 cells in the IM-1062 and IM-1093 Tribody treated groups versus PBS treated control group. Similarly, % activated T-cells is significantly higher in the IM-1062 and IM-1093 Tribody treated groups versus PBS treated control group (FIG. 52).

[0774] Conclusion: Efficacy of Tribody IM-1062 was consistently demonstrated in multiple in-vivo xenograft models with responses ranges from ~50% TGI up to complete response, with some studies indicating for lower efficacy for the NKG2A mutated IM-1093 Tribody. In addition, tumors were evaluated for % immune cell populations by FACS and the analysis indicated for massive recruitment and infiltration of immune cells into the TME in the Tribody treated groups.

### EXAMPLE 7

### In Vivo Efficacy of Tribody/ProTribody in Humanized Engrafted CD34+ NSG Mouse Expressing Human IL15

[0775] Objective: To examine the inhibition of tumor growth induced by the Tribody in HCT116 or MDA-MB-231engrafted hu-CD34 NSG-TM -IL15 mice expressing human IL15 for maintaining NK cells and other immune cell’s proliferation and population.

[0776] Methods: female hu-CD34 NSG™- SGM3 mice (Jax stock # 030890) mice from 4 different donors (150,165,173,174) were enrolled on this study.

[0777] HCT-116 cells were cultured as per ATCC protocol. HCT- 116 cells were suspended in PBS mixed 1:1 with GFR Matrigel to a final concentration of 50×10⁶ cells/ml. 100 ul per mouse were injected SC in the right flank of each mouse for a total of 5×10⁶ cells per mouse. Mice were randomized into treatment groups based on the tumor volume (50-150 mm³). 10 mice (10 animals/ 4 donors) in each group were inoculated with HCT116 cells. The study included IM-1062, IM-1093 and control (PBS only) and IP dosed daily with either 20ug/Kg/day or 100ug/Kg/day. Animals were monitored daily and twice a week measured for tumor volume and body weight.

[0778] In another study, MDA-MB231 cells were used. 6 mice (6 animals/ 2 donors) in each group were inoculated with MDA-MB-231 cells. The study included Tribody IM-1062, ProTribody IM-1184, ProTribody IM-1193 and control (PBS only) and IP dosed daily with either 20 ug/Kg/day or 100 ug/Kg/day for the Tribody, and either with 50 ug/Kg/day or 200 ug/Kg/day for the ProTribodies. Animals were monitored daily and twice a weekly measured for tumor volume and body weight.

[0779] Results: FIG. 53A presents the tumor volume (mm3) for the mice treated with Tribody IM-1062 at 20 ug/Kg/day (squares), 100 ug/Kg/day (triangles) and the mice treated with PBS control (circles). Administration of Tribody reduced dramatically tumor size compared with the control samples and showed >80% TGI. Similar observations were when treating with IM-1093, suggesting saturating conditions in this model (data not shown). FIG. 53B present tumor volume of individual mice treated with Tribody PBS (left) and mice treated with IM-1062 (right).

[0780] FIG. 53C presents the tumor volume (mm3) for the mice treated with Tribody IM-1062 at 100 ug/Kg/day (line marked with triangles), or with ProTribody IM-1184 at 200 ug/Kg/day (line marked with circle), or with non-cleavable ProTribody IM-1193 at 200 ug/Kg/day (line marked with square) or with PBS vehicle control (line marked with ellipse). Administration of Tribody reduced dramatically tumor size compared with the vehicle control samples. Similar observations were when treating with ProTribody IM-1184 showing dramatic tumor volume reduction as compared to the control group (vehicle). IM-1193 non-cleavable control ProTribody showed very little tumor growth inhibition as expected, indicating the masking of the CD3 CAP that blocks the binding to CD3 and hence lack of protease linker in this molecule prevents prominent activity in the TME.

[0781] In additional study administrated with HCT116 cells to NSG CD34+ engrafted mice boosted with IL15 plasmid, where mice dosed with 20 ug/Kg/day, significant efficacy of ~85% tumor growth inhibition (TGI) was observed in the IM-1062 Tribody treated mice versus the PBS treated mice, while no significant activity for the NKG2A mutated Tribody IM-1093 (data not shown). Tumors were further dissected, and cells were dissociated for immune phenotyping with significantly higher #CD45 and CD3 cells in the IM-1062 and IM-1093 Tribody treated groups versus s PBS treated control group (data not shown).

[0782] Conclusions: Efficacy of Tribody IM-1062 was consistently demonstrated in CD34+ engrafted mouse models with responses ranges from ~80%% TGI up to complete response . Efficacy of the ProTribody IM-1184 was demonstrated as well with complete response indicating that the active form was generated in the TME upon protease cleavage, while the non-cleavable ProTribody control format of IM-1193 showed low activity due to lack of cap removal at the TME.

The application's sequence listing, which the Patent Office published only in electronic form, follows.

SEQUENCE LISTING (726 sequences)

SEQ ID NO: 1 - protein, 207 aa, Homo sapiens
MQSGTHWRVLGLCLLSVGVWGQDGNEEMGGITQTPYKVSISGTTVILTCPQYPGSEILWQHNDKNIGGDEDDKNIGSDEDHLSLKEFSELEQSGYYVCYPRGSKPEDANFYLYLRARVCENCMEMDVMSVATIVIVDICITGGLLLLVYYWSKNRKAKAKPVTRGAGAGGRQRGQNKERPPPVPNPDYEPIRKGQRDLYSGLNQRRI

SEQ ID NO: 2 - protein, 186 aa, Homo sapiens
QDGNEEMGGITQTPYKVSISGTTVILTCPQYPGSEILWQHNDKNIGGDEDDKNIGSDEDHLSLKEFSELEQSGYYVCYPRGSKPEDANFYLYLRARVCENCMEMDVMSVATIVIVDICITGGLLLLVYYWSKNRKAKAKPVTRGAGAGGRQRGQNKERPPPVPNPDYEPIRKGQRDLYSGLNQRRI

SEQ ID NO: 3 - protein, 126 aa, Artificial Sequence
  source: /note="Description of Artificial Sequence: Synthetic extracellular CD3 epsilon sequence"
MQSGTHWRVLGLCLLSVGVWGQDGNEEMGGITQTPYKVSISGTTVILTCPQYPGSEILWQHNDKNIGGDEDDKNIGSDEDHLSLKEFSELEQSGYYVCYPRGSKPEDANFYLYLRARVCENCMEMD

SEQ ID NO: 4 - protein, 105 aa, Artificial Sequence
  source: /note="Description of Artificial Sequence: Synthetic extracellular CD3 epsilon mature sequence"
QDGNEEMGGITQTPYKVSISGTTVILTCPQYPGSEILWQHNDKNIGGDEDDKNIGSDEDHLSLKEFSELEQSGYYVCYPRGSKPEDANFYLYLRARVCENCMEMD

SEQ ID NO: 5 - protein, 27 aa, Artificial Sequence
  source: /note="Description of Artificial Sequence: Synthetic CAP sequence"
QDGNEEMGGITQTPYKVSISGTTVILT

SEQ ID NO: 6 - protein, 578 aa, Homo sapiens
SEVAHRFKDLGEENFKALVLIAFAQYLQQCPFEDHVKLVNEVTEFAKTCVADESAENCDKSLHTLFGDKLCTVATLRETYGEMADCCAKQEPERNECFLQHKDDNPNLPRLVRPEVDVMCTAFHDNEETFLKKYLYEIARRHPYFYAPELLFFAKRYKAAFTECCQAADKAACLLPKLDELRDEGKASSAKQRLKCASLQKFGERAFKAWAVARLSQRFPKAEFAEVSKLVTDLTKVHTECCHGDLLECADDRADLAKYICENQDSISSKLKECCEKPLLEKSHCIAEVENDEMPADLPSLAADFVESKDVCKNYAEAKDVFLGMFLYEYARRHPDYSVVLLLRLAKTYETTLEKCCAAADPHECYAKVFDEFKPLVEEPQNLIKQNCELFEQLGEYKFQNALLVRYTKKVPQVSTPTLVEVSRNLGKVGSKCCKHPEAKRMPCAEDYLSVVLNQLCVLHEKTPVSDRVTKCCTESLVNRRPCFSALEVDETYVPKEFNAETFTFHADICTLSEKERQIKKQTALVELVKHKPKATKEQLKAVMDDFAAFVEKCCKADDKETCFAEEGKKLVAASQAA

SEQ ID NO: 7 - protein, 577 aa, Homo sapiens
EVAHRFKDLGEENFKALVLIAFAQYLQQCPFEDHVKLVNEVTEFAKTCVADESAENCDKSLHTLFGDKLCTVATLRETYGEMADCCAKQEPERNECFLQHKDDNPNLPRLVRPEVDVMCTAFHDNEETFLKKYLYEIARRHPYFYAPELLFFAKRYKAAFTECCQAADKAACLLPKLDELRDEGKASSAKQRLKCASLQKFGERAFKAWAVARLSQRFPKAEFAEVSKLVTDLTKVHTECCHGDLLECADDRADLAKYICENQDSISSKLKECCEKPLLEKSHCIAEVENDEMPADLPSLAADFVESKDVCKNYAEAKDVFLGMFLYEYARRHPDYSVVLLLRLAKTYETTLEKCCAAADPHECYAKVFDEFKPLVEEPQNLIKQNCELFEQLGEYKFQNALLVRYTKKVPQVSTPTLVEVSRNLGKVGSKCCKHPEAKRMPCAEDYLSVVLNQLCVLHEKTPVSDRVTKCCTESLVNRRPCFSALEVDETYVPKEFNAETFTFHADICTLSEKERQIKKQTALVELVKHKPKATKEQLKAVMDDFAAFVEKCCKADDKETCFAEEGKKLVAASQAA

SEQ ID NO: 8 - DNA, 1731 bp, Homo sapiens
gaggtggcccacaggttcaaggatctgggcgaggagaacttcaaggccctggtgctgatcgccttcgcccagtatctgcagcagtgcccctttgaggaccacgtgaagctggtgaacgaggtgaccgagttcgccaagacatgcgtggccgacgagtccgccgagaattgtgataagtctctgcacaccctgtttggcgataagctgtgcaccgtggccacactgagggagacatacggcgagatggccgactgctgtgccaagcaggagcccgagcgcaacgagtgcttcctgcagcacaaggacgataaccctaatctgccacggctggtgagacctgaggtggacgtgatgtgcaccgccttccacgataatgaggagacatttctgaagaagtacctgtatgagatcgcccggagacacccttacttttatgccccagagctgctgttctttgccaagcggtacaaggcagccttcaccgagtgctgtcaggcagcagataaggcagcatgcctgctgccaaagctggacgagctgagggatgagggcaaggcaagctccgccaagcagcgcctgaagtgtgcaagcctgcagaagttcggagagagggcctttaaggcatgggcagtggcaaggctgtcccagcggttcccaaaggccgagtttgccgaggtgtctaagctggtgaccgacctgacaaaggtgcacaccgagtgctgtcacggcgacctgctggagtgcgcagacgatagagccgatctggccaagtacatctgtgagaaccaggactctatctctagcaagctgaaggagtgctgtgagaagcccctgctggagaagtcccactgcatcgccgaggtggagaacgacgagatgccagcagatctgccaagcctggcagcagacttcgtggagtccaaggacgtgtgcaagaattacgccgaggccaaggacgtgttcctgggcatgtttctgtacgagtatgccaggcgccaccctgactactccgtggtgctgctgctgcggctggccaagacctatgagaccacactggagaagtgctgtgccgccgccgacccccacgagtgctatgcaaaggtgttcgacgagtttaagcccctggtggaggagcctcagaacctgatcaagcagaattgtgagctgtttgagcagctgggcgagtacaagttccagaacgccctgctggtgagatataccaagaaggtgccacaggtgtctacccccacactggtggaggtgagccggaatctgggcaaggtcggctccaagtgctgtaagcaccctgaggccaagagaatgccatgcgccgaggattacctgtccgtggtgctgaaccagctgtgcgtgctgcacgagaagacccccgtgagcgacagggtgaccaagtgctgtacagagtctctggtgaaccggagaccatgctttagcgccctggaggtggatgagacatatgtgcccaaggagttcaatgccgagaccttcacatttcacgccgacatctgtaccctgagcgagaaggagcgccagatcaagaagcagacagccctggtggagctggtgaagcacaagccaaaggccaccaaggagcagctgaaggccgtgatggacgatttcgccgcctttgtggagaagtgctgtaaggccgacgataaggagacatgcttcgcagaggagggcaagaagctggtggcagcaagccaggcagca

SEQ ID NO: 9 - protein, 6 aa, Artificial Sequence
  source: /note="Description of Artificial Sequence: Synthetic MPP cleavable sequence"
PLGLAG

SEQ ID NO: 10 - protein, 8 aa, Artificial Sequence
  source: /note="Description of Artificial Sequence: Synthetic protease cleavable sequence"
GPLGMLSQ

SEQ ID NO: 11 - protein, 8 aa, Artificial Sequence
  source: /note="Description of Artificial Sequence: Synthetic protease cleavable sequence"
GPLGLWAQ

SEQ ID NO: 12 - protein, 7 aa, Artificial Sequence
  source: /note="Description of Artificial Sequence: Synthetic protease cleavable sequence"
GPLGLAG

SEQ ID NO: 13 - protein, 12 aa, Artificial Sequence
  source: /note="Description of Artificial Sequence: Synthetic protease cleavable sequence"
KKNPAELIGPVD

SEQ ID NO: 14 - protein, 13 aa, Artificial Sequence
  source: /note="Description of Artificial Sequence: Synthetic protease cleavable sequence"
KKQPAANLVAPED

SEQ ID NO: 15 - protein, 8 aa, Artificial Sequence
  source: /note="Description of Artificial Sequence: Synthetic protease cleavable sequence"
GPLGIAGQ

SEQ ID NO: 16 - protein, 6 aa, Artificial Sequence
  source: /note="Description of Artificial Sequence: Synthetic protease cleavable sequence"
PVGLIG

SEQ ID NO: 17 - protein, 6 aa, Artificial Sequence
  source: /note="Description of Artificial Sequence: Synthetic protease cleavable sequence"
NSGRAV

SEQ ID NO: 18 - protein, 5 aa, Artificial Sequence
  source: /note="Description of Artificial Sequence: Synthetic protease cleavable sequence"
SGRSA

SEQ ID NO: 19 - protein, 13 aa, Artificial Sequence
  source: /note="Description of Artificial Sequence: Synthetic protease cleavable sequence"
LGGSGRSANAILE

SEQ ID NO: 20 - protein, 4 aa, Artificial Sequence
  source: /note="Description of Artificial Sequence: Synthetic protease cleavable sequence"
SGRS

SEQ ID NO: 21 - protein, 9 aa, Artificial Sequence
  source: /note="Description of Artificial Sequence: Synthetic protease cleavable sequence"
GGSGRSANK

SEQ ID NO: 22 - protein, 14 aa, Artificial Sequence
  source: /note="Description of Artificial Sequence: Synthetic protease cleavable sequence"
LGGSGRSANAILEC

SEQ ID NO: 23 - protein, 5 aa, Artificial Sequence
  source: /note="Description of Artificial Sequence: Synthetic protease cleavable sequence"
GGGRR

SEQ ID NO: 24 - protein, 6 aa, Artificial Sequence
  source: /note="Description of Artificial Sequence: Synthetic protease cleavable sequence"
TGRGPS

SEQ ID NO: 25 - protein, 8 aa, Artificial Sequence
  source: /note="Description of Artificial Sequence: Synthetic protease cleavable sequence"
LSGRSDNH

SEQ ID NO: 26 - protein, 8 aa, Artificial Sequence
  source: /note="Description of Artificial Sequence: Synthetic protease cleavable sequence"
PLTGRSGG

SEQ ID NO: 27 - protein, 7 aa, Artificial Sequence
  source: /note="Description of Artificial Sequence: Synthetic protease cleavable sequence"
QRRVVGG

SEQ ID NO: 28 - protein, 1124 aa, Artificial Sequence
  source: /note="Description of Artificial Sequence: Synthetic HC EGFR Polypeptide with multiple cleavage protease sequence"
QDGNEEMGGITQTPYKVSISGTTVILTGGGGSGGGGSGGGGSEVAHRFKDLGEENFKALVLIAFAQYLQQCPFEDHVKLVNEVTEFAKTCVADESAENCDKSLHTLFGDKLCTVATLRETYGEMADCCAKQEPERNECFLQHKDDNPNLPRLVRPEVDVMCTAFHDNEETFLKKYLYEIARRHPYFYAPELLFFAKRYKAAFTECCQAADKAACLLPKLDELRDEGKASSAKQRLKCASLQKFGERAFKAWAVARLSQRFPKAEFAEVSKLVTDLTKVHTECCHGDLLECADDRADLAKYICENQDSISSKLKECCEKPLLEKSHCIAEVENDEMPADLPSLAADFVESKDVCKNYAEAKDVFLGMFLYEYARRHPDYSVVLLLRLAKTYETTLEKCCAAADPHECYAKVFDEFKPLVEEPQNLIKQNCELFEQLGEYKFQNALLVRYTKKVPQVSTPTLVEVSRNLGKVGSKCCKHPEAKRMPCAEDYLSVVLNQLCVLHEKTPVSDRVTKCCTESLVNRRPCFSALEVDETYVPKEFNAETFTFHADICTLSEKERQIKKQTALVELVKHKPKATKEQLKAVMDDFAAFVEKCCKADDKETCFAEEGKKLVAASQAAGGSGGSPLGLAGGGGSGRSDNHGGSGGSEVQLVESGGGLVQPGGSLRLSCAASGFTFNTYAMNWVRQAPGKGLEWVARIRSKYNNYATYYADSVKDRFTISRDDSKNTLYLQMNSLRAEDTAVYYCVRHGNFGNSYVSWFAYWGQGTMVTVSSASTKGPSVFPLAPSSKSTSGGTAALGCLVKDYFPEPVTVSWNSGALTSGVHTFPAVLQSSGLYSLSSVVTVPSSSLGTQTYICNVNHKPSNTKVDKRVEPKSCPPCGGGGSDIQMTQSPSSLSASVGDRVTITCQASQDISNYLNWYQQKPGKAPKLLIYDASNLETGVPSRFSGSGSGTDFTFTISSLQPEDIATYFCQHFDHLPLAFGGGTKVEIKGGGGSGGGGSGGGGSQVQLQESGPGLVKPSETLSLTCTVSGGSVSSGDYYWTWIRQSPGKGLEWIGHIYYSGNTNYNPSLKSRLTISIDTSKTQFSLKLSSVTAADTAIYYCVRDRVTGAFDIWGQGTMVTVSS

SEQ ID NO: 29 - protein, 4 aa, Artificial Sequence
  source: /note="Description of Artificial Sequence: Synthetic protease cleavable sequence"
AANL

SEQ ID NO: 30 - protein, 4 aa, Artificial Sequence
  source: /note="Description of Artificial Sequence: Synthetic protease cleavable sequence"
PTNL

SEQ ID NO: 31 - protein, 1114 aa, Artificial Sequence
  source: /note="Description of Artificial Sequence: Synthetic HC EGFR Polypeptide with MMP2/9 cleavage protease sequence"
QDGNEEMGGITQTPYKVSISGTTVILTGGGGSGGGGSGGGGSEVAHRFKDLGEENFKALVLIAFAQYLQQCPFEDHVKLVNEVTEFAKTCVADESAENCDKSLHTLFGDKLCTVATLRETYGEMADCCAKQEPERNECFLQHKDDNPNLPRLVRPEVDVMCTAFHDNEETFLKKYLYEIARRHPYFYAPELLFFAKRYKAAFTECCQAADKAACLLPKLDELRDEGKASSAKQRLKCASLQKFGERAFKAWAVARLSQRFPKAEFAEVSKLVTDLTKVHTECCHGDLLECADDRADLAKYICENQDSISSKLKECCEKPLLEKSHCIAEVENDEMPADLPSLAADFVESKDVCKNYAEAKDVFLGMFLYEYARRHPDYSVVLLLRLAKTYETTLEKCCAAADPHECYAKVFDEFKPLVEEPQNLIKQNCELFEQLGEYKFQNALLVRYTKKVPQVSTPTLVEVSRNLGKVGSKCCKHPEAKRMPCAEDYLSVVLNQLCVLHEKTPVSDRVTKCCTESLVNRRPCFSALEVDETYVPKEFNAETFTFHADICTLSEKERQIKKQTALVELVKHKPKATKEQLKAVMDDFAAFVEKCCKADDKETCFAEEGKKLVAASQAAGGSGGSPLGLAGGGSGGSEVQLVESGGGLVQPGGSLRLSCAASGFTFNTYAMNWVRQAPGKGLEWVARIRSKYNNYATYYADSVKDRFTISRDDSKNTLYLQMNSLRAEDTAVYYCVRHGNFGNSYVSWFAYWGQGTMVTVSSASTKGPSVFPLAPSSKSTSGGTAALGCLVKDYFPEPVTVSWNSGALTSGVHTFPAVLQSSGLYSLSSVVTVPSSSLGTQTYICNVNHKPSNTKVDKRVEPKSCPPCGGGGSDIQMTQSPSSLSASVGDRVTITCQASQDISNYLNWYQQKPGKAPKLLIYDASNLETGVPSRFSGSGSGTDFTFTISSLQPEDIATYFCQHFDHLPLAFGGGTKVEIKGGGGSGGGGSGGGGSQVQLQESGPGLVKPSETLSLTCTVSGGSVSSGDYYWTWIRQSPGKGLEWIGHIYYSGNTNYNPSLKSRLTISIDTSKTQFSLKLSSVTAADTAIYYCVRDRVTGAFDIWGQGTMVTVSS

SEQ ID NO: 32 - protein, 469 aa, Artificial Sequence
  source: /note="Description of Artificial Sequence: Synthetic LC EGFR Polypeptide sequence"
GGSGGSQAVVTQEPSLTVSPGGTVTLTCRSSTGAVTTSNYANWVQQKPGQAPRGLIGGTNKRAPGTPARFSGSLLGGKAALTLSGVQPEDEAEYYCALWYSNLWVFGGGTKLTVLGQPKAAPSVTLFPPSSEELQANKATLVCLISDFYPGAVTVAWKADSSPVKAGVETTTPSKQSNNKYAASSYLSLTPEQWKSHRSYSCQVTHEGSTVEKTVAPTECPPCSGGGSDIQMTQSPSSLSASVGDRVTITCQASQDISNYLNWYQQKPGKAPKLLIYDASNLETGVPSRFSGSGSGTDFTFTISSLQPEDIATYFCQHFDHLPLAFGGGTKVEIKGGGGSGGGGSGGGGSQVQLQESGPGLVKPSETLSLTCTVSGGSVSSGDYYWTWIRQSPGKGLEWIGHIYYSGNTNYNPSLKSRLTISIDTSKTQFSLKLSSVTAADTAIYYCVRDRVTGAFDIWGQGTMVTVSS

SEQ ID NO: 33 - DNA, 18 bp, Artificial Sequence
  source: /note="Description of Artificial Sequence: Synthetic protease cleavable sequence"
ccactgggcctggccggc

SEQ ID NO: 34 - protein, 107 aa, Artificial Sequence [sequence omitted]

SEQ ID NO: 35 - protein, 13 aa, Artificial Sequence
  source: /note="Description of Artificial Sequence: Synthetic protease cleavable sequence"
PLGLAGSGRSDNH

SEQ ID NO: 36 - DNA, 321 bp, Artificial Sequence
  source: /note="Description of Artificial Sequence: Synthetic anti-EGFR VL sequence"
gatatccagatgacccaaagccccagtagcctgtccgccagtgtaggagatagggtaaccatcacttgccaagcgagccaagacatcagcaactacctgaattggtatcagcagaagcccggcaaagcacccaagctcctgatctacgacgccagcaatctggagaccggcgtgcccagcaggttcagcggatctggtagcggcaccgacttcaccttcaccataagtagtctgcagcccgaggacatcgccacctacttctgtcagcacttcgatcacctgcccctggccttcggcggtgggaccaaggtggagatcaag

SEQ ID NO: 37 - protein, 119 aa, Artificial Sequence [sequence omitted]

SEQ ID NO: 38 - DNA, 357 bp, Artificial Sequence
  source: /note="Description of Artificial Sequence: Synthetic anti-EGFR-VH sequence"
caggtgcagcttcaagagagcggacccggcctcgtgaagcccagcgagaccttgagcctgacctgcactgtgagtggcggtagcgtgagcagcggcgactattactggacctggatcaggcagagccctggcaaggggctggagtggatcggccacatctactacagcgggaacacgaactacaaccccagcctgaagagcaggctgacgatcagcatcgacacgagcaagacccagttctcacttaagctcagcagcgtgaccgccgcagacaccgccatatactactgcgtgagggacagggtgacgggcgctttcgacatctggggccaaggcacaatggtcacggtgagctcc

SEQ ID NO: 39 - protein, 15 aa, Artificial Sequence
  source: /note="Description of Artificial Sequence: Synthetic linker"
GGGGSGGGGSGGGGS

SEQ ID NO: 40 - DNA, 45 bp, Artificial Sequence
  source: /note="Description of Artificial Sequence: Synthetic linker"
ggtgggggtggcagcgggggaggcggaagcggcggaggtggctct

SEQ ID NO: 41 - protein, 241 aa, Artificial Sequence
  source: /note="Description of Artificial Sequence: Synthetic anti-EGFR VL-linker-VH sequence"
DIQMTQSPSSLSASVGDRVTITCQASQDISNYLNWYQQKPGKAPKLLIYDASNLETGVPSRFSGSGSGTDFTFTISSLQPEDIATYFCQHFDHLPLAFGGGTKVEIKGGGGSGGGGSGGGGSQVQLQESGPGLVKPSETLSLTCTVSGGSVSSGDYYWTWIRQSPGKGLEWIGHIYYSGNTNYNPSLKSRLTISIDTSKTQFSLKLSSVTAADTAIYYCVRDRVTGAFDIWGQGTMVTVSS

SEQ ID NO: 42 - protein, 241 aa, Artificial Sequence
  source: /note="Description of Artificial Sequence: Synthetic anti-EGFR VH-linker-VL sequence"
QVQLQESGPGLVKPSETLSLTCTVSGGSVSSGDYYWTWIRQSPGKGLEWIGHIYYSGNTNYNPSLKSRLTISIDTSKTQFSLKLSSVTAADTAIYYCVRDRVTGAFDIWGQGTMVTVSSGGGGSGGGGSGGGGSDIQMTQSPSSLSASVGDRVTITCQASQDISNYLNWYQQKPGKAPKLLIYDASNLETGVPSRFSGSGSGTDFTFTISSLQPEDIATYFCQHFDHLPLAFGGGTKVEIK

SEQ ID NO: 43 - DNA, 726 bp, Artificial Sequence
  source: /note="Description of Artificial Sequence: Synthetic anti-EGFR VL-linker-VH sequence"
gatatccagatgacccaaagccccagtagcctgtccgccagtgtaggagatagggtaaccatcacttgccaagcgagccaagacatcagcaactacctgaattggtatcagcagaagcccggcaaagcacccaagctcctgatctacgacgccagcaatctggagaccggcgtgcccagcaggttcagcggatctggtagcggcaccgacttcaccttcaccataagtagtctgcagcccgaggacatcgccacctacttctgtcagcacttcgatcacctgcccctggccttcggcggtgggaccaaggtggagatcaagggtgggggtggcagcgggggaggcggaagcggcggaggtggctcttgccaggtgcagcttcaagagagcggacccggcctcgtgaagcccagcgagaccttgagcctgacctgcactgtgagtggcggtagcgtgagcagcggcgactattactggacctggatcaggcagagccctggcaaggggctggagtggatcggccacatctactacagcgggaacacgaactacaaccccagcctgaagagcaggctgacgatcagcatcgacacgagcaagacccagttctcacttaagctcagcagcgtgaccgccgcagacaccgccatatactactgcgtgagggacagggtgacgggcgctttcgacatctggggccaaggcacaatggtcacggtgagctcc

SEQ ID NO: 44 - DNA, 723 bp, Artificial Sequence
  source: /note="Description of Artificial Sequence: Synthetic anti-EGFR VH-linker-VL sequence"
caggtgcagcttcaagagagcggacccggcctcgtgaagcccagcgagaccttgagcctgacctgcactgtgagtggcggtagcgtgagcagcggcgactattactggacctggatcaggcagagccctggcaaggggctggagtggatcggccacatctactacagcgggaacacgaactacaaccccagcctgaagagcaggctgacgatcagcatcgacacgagcaagacccagttctcacttaagctcagcagcgtgaccgccgcagacaccgccatatactactgcgtgagggacagggtgacgggcgctttcgacatctggggccaaggcacaatggtcacggtgagctccggtgggggtggcagcgggggaggcggaagcggcggaggtggctctgatatccagatgacccaaagccccagtagcctgtccgccagtgtaggagatagggtaaccatcacttgccaagcgagccaagacatcagcaactacctgaattggtatcagcagaagcccggcaaagcacccaagctcctgatctacgacgccagcaatctggagaccggcgtgcccagcaggttcagcggatctggtagcggcaccgacttcaccttcaccataagtagtctgcagcccgaggacatcgccacctacttctgtcagcacttcgatcacctgcccctggccttcggcggtgggaccaaggtggagatcaag

SEQ ID NO: 45 - protein, 125 aa, Mus musculus
EVQLVESGGGLVQPKGSLKLSCAASGFTFNTYAMNWVRQAPGKGLEWVARIRSKYNNYATYYADSVKDRFTISRDDSQSILYLQMNNLKTEDTAMYYCVRHGNFGNSYVSWFAYWGQGTLVTVSA

SEQ ID NO: 46 - protein, 125 aa, Artificial Sequence
  source: /note="Description of Artificial Sequence: Synthetic anti-CD3 VH chain"
EVQLVESGGGLVQPGGSLRLSCAASGFTFSTYAMNWVRQAPGKGLEWVSRIRSKYNNYATYYADSVKDRFTISRDDSKNTLYLQMNSLRAEDTAVYYCARHGNFGNSYVSWFAYWGQGTLVTVSS

SEQ ID NO: 47 - protein, 125 aa, Artificial Sequence
  source: /note="Description of Artificial Sequence: Synthetic anti-CD3 VH chain"
EVQLVESGGGLVQPGGSLRLSCAASGFTFNTYAMNWVRQAPGKGLEWVSRIRSKYNNYATYYADSVKDRFTISRDDSKNTLYLQMNSLRAEDTAVYYCARHGNFGNSYVSWFAYWGQGTLVTVSS

SEQ ID NO: 48 - protein, 125 aa, Artificial Sequence
  source: /note="Description of Artificial Sequence: Synthetic anti-CD3 VH chain"
EVQLVESGGGLVQPGGSLRLSCAASGFTFSTYAMNWVRQAPGKGLEWVARIRSKYNNYATYYADSVKDRFTISRDDSKNTLYLQMNSLRAEDTAVYYCARHGNFGNSYVSWFAYWGQGTLVTVSS

SEQ ID NO: 49 - protein, 125 aa, Artificial Sequence
  source: /note="Description of Artificial Sequence: Synthetic anti-CD3 VH chain"
EVQLVESGGGLVQPGGSLRLSCAASGFTFSTYAMNWVRQAPGKGLEWVARIRSKYNNYATYYADSVKDRFTISRDDSKNTLYLQMNSLRAEDTAVYYCVRHGNFGNSYVSWFAYWGQGTLVTVSS

SEQ ID NO: 50 - protein, 125 aa, Artificial Sequence
  source: /note="Description of Artificial Sequence: Synthetic anti-CD3 VH chain"
EVQLVESGGGLVQPGGSLRLSCAASGFTFNTYAMNWVRQAPGKGLEWVARIRSKYNNYATYYADSVKDRFTISRDDSKNTLYLQMNSLRAEDTAVYYCVRHGNFGNSYVSWFAYWGQGTLVTVSS

SEQ ID NO: 51 - protein, 125 aa, Artificial Sequence
  source: /note="Description of Artificial Sequence: Synthetic anti-CD3 VH chain"
EVQLVESGGGLVQPGGSLRLSCAASGFTFSTYAMNWVRQAPGKGLEWVSRIRSKYNNYATYYADSVKDRFTISRDDSKNTLYLQMNSLRAEDTAVYYCARHGNFGNSYVSWFAYWGQGTMVTVSS

SEQ ID NO: 52 - protein, 125 aa, Artificial Sequence
  source: /note="Description of Artificial Sequence: Synthetic anti-CD3 VH chain"
EVQLVESGGGLVQPGGSLKLSCAASGFTFNKYAMNWVRQAPGKGLEWVARIRSKYNNYATYYADSVKDRFTISRDDSKNTAYLQMNNLKTEDTAVYYCVRHGNFGNSYISYWAYWGQGTLVTVSS

SEQ ID NO: 53 - protein, 125 aa, Artificial Sequence
  source: /note="Description of Artificial Sequence: Synthetic anti-CD3 VH chain"
EVQLVESGGGLVQPGGSLKLSCAASGFTFNIYAMNWVRQAPGKGLEWVARIRSKYNNYATYYADSVKSRFTISRDDSKNTAYLQMNNLKTEDTAVYYCVRHGNFGNSYVSFFAYWGQGTLVTVSS

SEQ ID NO: 54 - protein, 125 aa, Artificial Sequence
  source: /note="Description of Artificial Sequence: Synthetic anti-CD3 VH chain"
EVQLLESGGGLVQPGGSLKLSCAASGFTFNIYAMNWVRQAPGKGLEWVARIRSKYNNYATYYADSVKSRFTISRDDSKNTAYLQMNNLKTEDTAVYYCVRHGNFGNSYVSFFAYWGQGTLVTVSS

SEQ ID NO: 55 - protein, 125 aa, Artificial Sequence
  source: /note="Description of Artificial Sequence: Synthetic anti-CD3 VH chain"
EVQLLESGGGLVQPGGSLKLSCAASGFTFNKYAMNWVRQAPGKGLEWVARIRSKYNNYATYYADSVKDRFTISRDDSKNTAYLQMNNLKTEDTAVYYCVRHGNFGNSYISYWAYWGQGTLVTVSS

SEQ ID NO: 56 - protein, 125 aa, Artificial Sequence
  source: /note="Description of Artificial Sequence: Synthetic anti-CD3 VH chain"
EVQLVESGGGLEQPGGSLKLSCAASGFTFNSYAMNWVRQAPGKGLEWVARIRSKYNNYATYYADSVKGRFTISRDDSKNTAYLQMNNLKTEDTAVYYCVRHGNFGNSYLSFWAYWGQGTLVTVSS

SEQ ID NO: 57 - protein, 125 aa, Artificial Sequence
  source: /note="Description of Artificial Sequence: Synthetic anti-CD3 VH chain"
EVQLLESGGGLEQPGGSLKLSCAASGFTFNSYAMNWVRQAPGKGLEWVARIRSKYNNYATYYADSVKGRFTISRDDSKNTAYLQMNNLKTEDTAVYYCVRHGNFGNSYLSFWAYWGQGTLVTVSS

SEQ ID NO: 58 - protein, 125 aa, Artificial Sequence
  source: /note="Description of Artificial Sequence: Synthetic anti-CD3 VH chain"
EVQLVESGGGLVQPGGSLKLSCAASGFTFNRYAMNWVRQAPGKGLEWVARIRSKYNNYATYYADSVKGRFTISRDDSKNTAYLQMNNLKTEDTAVYYCVRHGNFGNSYLSYFAYWGQGTLVTVSS

SEQ ID NO: 59 - protein, 125 aa, Artificial Sequence
  source: /note="Description of Artificial Sequence: Synthetic anti-CD3 VH chain"
EVQLLESGGGLVQPGGSLKLSCAASGFTFNRYAMNWVRQAPGKGLEWVARIRSKYNNYATYYADSVKGRFTISRDDSKNTAYLQMNNLKTEDTAVYYCVRHGNFGNSYLSYFAYWGQGTLVTVSS

SEQ ID NO: 60 - protein, 125 aa, Artificial Sequence
  source: /note="Description of Artificial Sequence: Synthetic anti-CD3 VH chain"
EVQLVESGGGLVQPGGSLKLSCAASGFTFNVYAMNWVRQAPGKGLEWVARIRSKYNNYATYYADSVKKRFTISRDDSKNTAYLQMNNLKTEDTAVYYCVRHGNFGNSYLSWWAYWGQGTLVTVSS

SEQ ID NO: 61 - protein, 125 aa, Artificial Sequence
  source: /note="Description of Artificial Sequence: Synthetic anti-CD3 VH chain"
EVQLLESGGGLVQPGGSLKLSCAASGFTFNVYAMNWVRQAPGKGLEWVARIRSKYNNYATYYADSVKKRFTISRDDSKNTAYLQMNNLKTEDTAVYYCVRHGNFGNSYLSWWAYWGQGTLVTVSS

SEQ ID NO: 62 - protein, 125 aa, Artificial Sequence
  source: /note="Description of Artificial Sequence: Synthetic anti-CD3 VH chain"
EVQLVESGGGLVQPGGSLKLSCAASGFTFNKYAMNWVRQAPGKGLEWVARIRSKYNNYATYYADSVKSRFTISRDDSKNTAYLQMNNLKTEDTAVYYCVRHGNFGNSYTSYYAYWGQGTLVTVSS

SEQ ID NO: 63 - protein, 125 aa, Artificial Sequence
  source: /note="Description of Artificial Sequence: Synthetic anti-CD3 VH chain"
EVQLLESGGGLVQPGGSLKLSCAASGFTFNKYAMNWVRQAPGKGLEWVARIRSKYNNYATYYADSVKSRFTISRDDSKNTAYLQMNNLKTEDTAVYYCVRHGNFGNSYTSYYAYWGQGTLVTVSS

SEQ ID NO: 64 - protein, 125 aa, Artificial Sequence
  source: /note="Description of Artificial Sequence: Synthetic anti-CD3 VH chain"
EVQLVESGGGLVQPGGSLKLSCAASGFTFNGYAMNWVRQAPGKGLEWVARIRSKYNNYATYYADSVKERFTISRDDSKNTAYLQMNNLKTEDTAVYYCVRHRNFGNSYLSWFAYWGQGTLVTVSS

SEQ ID NO: 65 - protein, 125 aa, Artificial Sequence
  source: /note="Description of Artificial Sequence: Synthetic anti-CD3 VH chain"
EVQLLESGGGLVQPGGSLKLSCAASGFTFNGYAMNWVRQAPGKGLEWVARIRSKYNNYATYYADSVKERFTISRDDSKNTAYLQMNNLKTEDTAVYYCVRHRNFGNSYLSWFAYWGQGTLVTVSS

SEQ ID NO: 66 - protein, 125 aa, Artificial Sequence
  source: /note="Description of Artificial Sequence: Synthetic anti-CD3 VH chain"
EVQLVESGGGLVQPGGSLKLSCAASGFTFNVYAMNWVRQAPGKGLEWVARIRSKYNNYATYYADSVKKRFTISRDDSKNTAYLQMNNLKTEDTAVYYCVRHGNFGNSYISWWAYWGQGTLVTVSS

SEQ ID NO: 67 - protein, 125 aa, Artificial Sequence
  source: /note="Description of Artificial Sequence: Synthetic anti-CD3 VH chain"
EVQLLESGGGLVQPGGSLKLSCAASGFTFNVYAMNWVRQAPGKGLEWVARIRSKYNNYATYYADSVKKRFTISRDDSKNTAYLQMNNLKTEDTAVYYCVRHGNFGNSYISWWAYWGQGTLVTVSS

SEQ ID NO: 68 - protein, 125 aa, Artificial Sequence
  source: /note="Description of Artificial Sequence: Synthetic anti-CD3 VH chain"
EVQLVESGGGLVQPGGSLKLSCAASGFTFNSYAMNWVRQAPGKGLEWVARIRSKYNNYATYYADSVKGRFTISRDDSKNTAYLQMNNLKTEDTAVYYCVRHGNFGNSYVSWWAYWGQGTLVTVSS

SEQ ID NO: 69 - protein, 125 aa, Artificial Sequence
  source: /note="Description of Artificial Sequence: Synthetic anti-CD3 VH chain"
EVQLLESGGGLVQPGGSLKLSCAASGFTFNSYAMNWVRQAPGKGLEWVARIRSKYNNYATYYADSVKGRFTISRDDSKNTAYLQMNNLKTEDTAVYYCVRHGNFGNSYVSWWAYWGQGTLVTVSS

SEQ ID NO: 70 - protein, 125 aa, Artificial Sequence; identical to SEQ ID NO: 55
  source: /note="Description of Artificial Sequence: Synthetic anti-CD3 VH chain"

SEQ ID NO: 71 - protein, 125 aa, Artificial Sequence
  source: /note="Description of Artificial Sequence: Synthetic anti-CD3 VH chain"
EVQLVESGGGLVQPGGSLRLSCAASGFTFNTYAMNWVRQAPGKGLEWVARIRSKYNNYATYYADSVKDRFTISRDDSKNSLYLQMNSLKTEDTAVYYCVRHGNFGNSYVSWFAYWGQGTLVTVSS

SEQ ID NO: 72 - protein, 125 aa, Artificial Sequence
  source: /note="Description of Artificial Sequence: Synthetic anti-CD3 VH chain"
EVQLVESGGGLVQPGGSLRLSCAASGFTFSTYAMNWVRQAPGKGLEWVGRIRSKYNNYATYYADSVKGRFTISRDDSKNTLYLQMNSLRAEDTAVYYCVRHGNFGDSYVSWFAYWGQGTLVTVSS

SEQ ID NO: 73 - protein, 109 aa, Mus musculus
QAVVTQESALTTSPGETVTLTCRSSTGAVTTSNYANWVQEKPDHLFTGLIGGTNKRAPGVPARFSGSLIGDKAALTITGAQTEDEAIYFCALWYSNLWVFGGGTKLTVL

SEQ ID NO: 74 - protein, 213 aa, Artificial Sequence
  source: /note="Description of Artificial Sequence: Synthetic anti-CD3 epsilon Variable Light chain and Constant Light Chain"
QAVVTQEPSLTVSPGGTVTLTCRSSTGAVTTSNYANWVQQKPGQAPRGLIGGTNKRAPGTPARFSGSLLGGKAALTLSGVQPEDEAEYYCALWYSNLWVFGGGTKLTVLGQPKAAPSVTLFPPSSEELQANKATLVCLISDFYPGAVTVAWKADSSPVKAGVETTTPSKQSNNKYAASSYLSLTPEQWKSHRSYSCQVTHEGSTVEKTVAPTE

SEQ ID NO: 75 - protein, 99 aa, Artificial Sequence
  source: /note="Description of Artificial Sequence: Synthetic anti-CD3 epsilon VL sequence"
QAVVTQEPSLTVSPGGTVTLTCRSSTGAVTTSNYANWVQQKPGQAPRGLIGGTNKRAPGTPARFSGSLLGGKAALTLSGVQPEDEAEYYCALWYSNLWV

SEQ ID NO: 76 - protein, 99 aa, Artificial Sequence
  source: /note="Description of Artificial Sequence: Synthetic anti-CD3 epsilon VL sequence"
QAVVTQEPSLTVSPGGTVTLTCRSSTGAVTTSNYANWVQQKPGQAPRGLIGGTNKRAPWTPARFSGSLLGGKAALTLSGVQPEDEAEYYCALWYSNLWV

SEQ ID NO: 77 - protein, 99 aa, Artificial Sequence
  source: /note="Description of Artificial Sequence: Synthetic anti-CD3 epsilon VL sequence"
QTVVTQEPSLTVSPGGTVTLTCASSTGAVTTSNYANWVQQKPGQAPRGLIGGTNKRAPWTPARFSGSLLGGKAALTLSGVQPEDEAEYYCALWYSNLWV

SEQ ID NO: 78 - protein, 99 aa, Artificial Sequence
  source: /note="Description of Artificial Sequence: Synthetic anti-CD3 epsilon VL sequence"
QTVVTQEPSLTVSPGGTVTLTCASSTGAVTSGYYPNWVQQKPGQAPRGLIGGTNKRAPWTPARFSGSLLGGKAALTLSGVQPEDEAEYYCALWYSNLWV

SEQ ID NO: 79 - protein, 99 aa, Artificial Sequence
  source: /note="Description of Artificial Sequence: Synthetic anti-CD3 epsilon VL sequence"
QTVVTQEPSLTVSPGGTVTLTCASSTGAVTSGYYPNWVQQKPGQAPRGLIGGTNKRAPWTPARFSGSLLGGKAALTLSGVQPEDEAEYYCLLWYSNLWV

SEQ ID NO: 80 - protein, 109 aa, Artificial Sequence
  source: /note="Description of Artificial Sequence: Synthetic anti-CD3 epsilon VL sequence"
QAVVTQEPSLTVSPGGTVTLTCRSSTGAVTTSNYANWVQQKPGQAPRGLIGGTNKRAPGTPARFSGSLLGGKAALTLSGTQPEDEAEYYCALWYSNLWVFGGGTKLTVL

SEQ ID NO: 81 - protein, 109 aa, Artificial Sequence
  source: /note="Description of Artificial Sequence: Synthetic anti-CD3 epsilon VL sequence"
QAVVTQEPSLTVSPGGTVTLTCRSSTGAVTTSNYANWVQQKPGQAPRGLIGGTNKRAPWTPARFSGSLLGGKAALTLSWTQPEDEAEYYCALWYSNLWVFGGGTKLTVL

SEQ ID NO: 82 - protein, 109 aa, Artificial Sequence
  source: /note="Description of Artificial Sequence: Synthetic anti-CD3 epsilon VL sequence"
QTVVTQEPSLTVSPGGTVTLTCGSSTGAVTSGYYPNWVQQKPGQAPRGLIGGTKFLAPGTPARFSGSLLGGKAALTLSGVQPEDEAEYYCALWYSNRWVFGGGTKLTVL

SEQ ID NO: 83 - protein, 109 aa, Artificial Sequence
  source: /note="Description of Artificial Sequence: Synthetic anti-CD3 epsilon VL sequence"
QTVVTQEPSLTVSPGGTVTLTCGSSTGAVTSGNYPNWVQQKPGQAPRGLIGGTKFLAPGTPARFSGSLLGGKAALTLSGVQPEDEAEYYCVLWYSNRWVFGGGTKLTVL

SEQ ID NO: 84 - protein, 109 aa, Artificial Sequence; identical to SEQ ID NO: 82
  source: /note="Description of Artificial Sequence: Synthetic anti-CD3 epsilon VL sequence"

SEQ ID NO: 85 - protein, 109 aa, Artificial Sequence
  source: /note="Description of Artificial Sequence: Synthetic anti-CD3 epsilon VL sequence"
ELVVTQEPSLTVSPGGTVTLTCGSSTGAVTSGYYPNWVQQKPGQAPRGLIGGTKFLAPGTPARFSGSLLGGKAALTLSGVQPEDEAEYYCALWYSNRWVFGGGTKLTVL

SEQ ID NO: 86 - protein, 109 aa, Artificial Sequence; identical to SEQ ID NO: 85
  source: /note="Description of Artificial Sequence: Synthetic anti-CD3 epsilon VL sequence"

SEQ ID NO: 87 - protein, 109 aa, Artificial Sequence; identical to SEQ ID NO: 82
  source: /note="Description of Artificial Sequence: Synthetic anti-CD3 epsilon VL sequence"

SEQ ID NO: 88 - protein, 109 aa, Artificial Sequence; identical to SEQ ID NO: 85
  source: /note="Description of Artificial Sequence: Synthetic anti-CD3 epsilon VL sequence"

SEQ ID NO: 89 - protein, 109 aa, Artificial Sequence; identical to SEQ ID NO: 82
  source: /note="Description of Artificial Sequence: Synthetic anti-CD3 epsilon VL sequence"

SEQ ID NO: 90 - protein, 109 aa, Artificial Sequence; identical to SEQ ID NO: 85
  source: /note="Description of Artificial Sequence: Synthetic anti-CD3 epsilon VL sequence"

SEQ ID NO: 91 - protein, 109 aa, Artificial Sequence
  source: /note="Description of Artificial Sequence: Synthetic anti-CD3 epsilon VL sequence"
QTVVTQEPSLTVSPGGTVTLTCRSSTGAVTSGYYPNWVQQKPGQAPRGLIGATDMRPSGTPARFSGSLLGGKAALTLSGVQPEDEAEYYCALWYSNRWVFGGGTKLTVL

SEQ ID NO: 92 - protein, 109 aa, Artificial Sequence
  source: /note="Description of Artificial Sequence: Synthetic anti-CD3 epsilon VL sequence"
ELVVTQEPSLTVSPGGTVTLTCRSSTGAVTSGYYPNWVQQKPGQAPRGLIGATDMRPSGTPARFSGSLLGGKAALTLSGVQPEDEAEYYCALWYSNRWVFGGGTKLTVL

SEQ ID NO: 93 - protein, 109 aa, Artificial Sequence; identical to SEQ ID NO: 82
  source: /note="Description of Artificial Sequence: Synthetic anti-CD3 epsilon VL sequence"

SEQ ID NO: 94 - protein, 109 aa, Artificial Sequence; identical to SEQ ID NO: 85
  source: /note="Description of Artificial Sequence: Synthetic anti-CD3 epsilon VL sequence"

SEQ ID NO: 95 - protein, 109 aa, Artificial Sequence; identical to SEQ ID NO: 91
  source: /note="Description of Artificial Sequence: Synthetic anti-CD3 epsilon VL sequence"

SEQ ID NO: 96 - protein, 109 aa, Artificial Sequence; identical to SEQ ID NO: 92
  source: /note="Description of Artificial Sequence: Synthetic anti-CD3 epsilon VL sequence"

SEQ ID NO: 97 - protein, 109 aa, Artificial Sequence; identical to SEQ ID NO: 82
  source: /note="Description of Artificial Sequence: Synthetic anti-CD3 epsilon VL sequence"

SEQ ID NO: 98 - protein, 109 aa, Artificial Sequence; identical to SEQ ID NO: 85
  source: /note="Description of Artificial Sequence: Synthetic anti-CD3 epsilon VL sequence"

SEQ ID NO: 99 - protein, 109 aa, Artificial Sequence; identical to SEQ ID NO: 83
  source: /note="Description of Artificial Sequence: Synthetic anti-CD3 epsilon VL sequence"

SEQ ID NO: 100 - protein, 109 aa, Artificial Sequence
  source: /note="Description of Artificial Sequence: Synthetic anti-CD3 epsilon VL sequence"
ELVVTQEPSLTVSPGGTVTLTCGSSTGAVTSGNYPNWVQQKPGQAPRGLIGGTKFLAPGTPARFSGSLLGGKAALTLSGVQPEDEAEYYCVLWYSNRWVFGGGTKLTVL

SEQ ID NO: 101 - protein, 109 aa, Artificial Sequence; identical to SEQ ID NO: 100
  source: /note="Description of Artificial Sequence: Synthetic anti-CD3 epsilon VL sequence"

SEQ ID NO: 102 - protein, 109 aa, Artificial Sequence
  source: /note="Description of Artificial Sequence: Synthetic anti-CD3 epsilon VL sequence"
QAVVTQEPSLTVSPGGTVTLTCRSSTGAVTTSNYANWVQQKPGQAPRGLIGGTNKRAPWTPARFSGSLLGGKAALTITGAQAEDEADYYCALWYSNLWVFGGGTKLTVL

SEQ ID NO: 103 - protein, 109 aa, Artificial Sequence
  source: /note="Description of Artificial Sequence: Synthetic anti-CD3 epsilon VL sequence"
QAVVTQEPSLTVSPGGTVTLTCGSSTGAVTTSNYANWVQQKPGKSPRGLIGGTNKRAPGVPARFSGSLLGGKAALTISGAQPEDEADYYCALWYSNHWVFGGGTKLTVL

SEQ ID NO: 104 - protein, 7 aa, Artificial Sequence
  source: /note="Description of Artificial Sequence: Synthetic CDR1 of Heavy Chain (CDR-H1)"
  MOD_RES (2)..(3): Any amino acid
TXXYAMN

SEQ ID NO: 105 - protein, 19 aa, Artificial Sequence
  source: /note="Description of Artificial Sequence: Synthetic CDR2 of Heavy Chain (CDR-H2)"
RIRSKYNNYATYYADSVKD

SEQ ID NO: 106 - protein, 14 aa, Artificial Sequence
  source: /note="Description of Artificial Sequence: Synthetic CDR3 of Heavy Chain (CDR-H3)"
HGNFGNSYVSWFAY

SEQ ID NO: 107 - protein, 14 aa, Artificial Sequence
  source: /note="Description of Artificial Sequence: Synthetic CDR1 of Light Chain (CDR-L1)"
RSSTGAVTTSNYAN

SEQ ID NO: 108 - protein, 14 aa, Artificial Sequence
  source: /note="Description of Artificial Sequence: Synthetic CDR1 of Light Chain (CDR-L1)"
ASSTGAVTTSNYAN

SEQ ID NO: 109 - protein, 14 aa, Artificial Sequence
  source: /note="Description of Artificial Sequence: Synthetic CDR1 of Light Chain (CDR-L1)"
ASSTGAVTSGYYPN

SEQ ID NO: 110 - protein, 7 aa, Artificial Sequence
  source: /note="Description of Artificial Sequence: Synthetic CDR2 of Light Chain (CDR-L2)"
GTNKRAP

SEQ ID NO: 111 - protein, 9 aa, Artificial Sequence
  source: /note="Description of Artificial Sequence: Synthetic CDR3 of Light Chain (CDR-L3)"
ALWYSNLWV

SEQ ID NO: 112 - protein, 9 aa, Artificial Sequence
  source: /note="Description of Artificial Sequence: Synthetic CDR3 of Light Chain (CDR-L3)"
LLWYSNLWV

SEQ ID NO: 113 - protein, 223 aa, Artificial Sequence
  source: /note="Description of Artificial Sequence: Synthetic anti-CD3 Variable Heavy chainB and heavy constant region 1"
EVQLVESGGGLVQPGGSLRLSCAASGFTFNTYAMNWVRQAPGKGLEWVARIRSKYNNYATYYADSVKDRFTISRDDSKNTLYLQMNSLRAEDTAVYYCVRHGNFGNSYVSWFAYWGQGTMVTVSSASTKGPSVFPLAPSSKSTSGGTAALGCLVKDYFPEPVTVSWNSGALTSGVHTFPAVLQSSGLYSLSSVVTVPSSSLGTQTYICNVNHKPSNTKVDKRV

SEQ ID NO: 114 - protein, 125 aa, Artificial Sequence
  source: /note="Description of Artificial Sequence: Synthetic anti-CD3 epsilon VH sequence"
EVQLVESGGGLVQPGGSLRLSCAASGFTFNTYAMNWVRQAPGKGLEWVARIRSKYNNYATYYADSVKDRFTISRDDSKNTLYLQMNSLRAEDTAVYYCVRHGNFGNSYVSWFAYWGQGTMVTVSS

SEQ ID NO: 115 - protein, 98 aa, Artificial Sequence
  source: /note="Description of Artificial Sequence: Synthetic anti-CD3 epsilon Constant Heavy Chain"
ASTKGPSVFPLAPSSKSTSGGTAALGCLVKDYFPEPVTVSWNSGALTSGVHTFPAVLQSSGLYSLSSVVTVPSSSLGTQTYICNVNHKPSNTKVDKRV

SEQ ID NO: 116 - protein, 109 aa, Artificial Sequence
  source: /note="Description of Artificial Sequence: Synthetic anti-CD3 epsilon VL sequence"
QAVVTQEPSLTVSPGGTVTLTCRSSTGAVTTSNYANWVQQKPGQAPRGLIGGTNKRAPGTPARFSGSLLGGKAALTLSGVQPEDEAEYYCALWYSNLWVFGGGTKLTVL

SEQ ID NO: 117 - protein, 109 aa, Artificial Sequence
  source: /note="Description of Artificial Sequence: Synthetic anti-CD3 epsilon Constant Light Chain"
GQPKAAPSVTLFPPSSEELQANKATLVCLISDFYPGAVTVAWKADSSPVKAGVETTTPSKQSNNKYAASSYLSLTPEQWKSHRSYSCQVTHEGSTVEKTVAPTECPPCS

SEQ ID NO: 118 - protein, 1129 aa, Artificial Sequence
  source: /note="Description of Artificial Sequence: Synthetic HC 5T4 Polypeptide with multiple cleavage protease sequence"
QDGNEEMGGITQTPYKVSISGTTVILTGGGGSGGGGSGGGGSEVAHRFKDLGEENFKALVLIAFAQYLQQCPFEDHVKLVNEVTEFAKTCVADESAENCDKSLHTLFGDKLCTVATLRETYGEMADCCAKQEPERNECFLQHKDDNPNLPRLVRPEVDVMCTAFHDNEETFLKKYLYEIARRHPYFYAPELLFFAKRYKAAFTECCQAADKAACLLPKLDELRDEGKASSAKQRLKCASLQKFGERAFKAWAVARLSQRFPKAEFAEVSKLVTDLTKVHTECCHGDLLECADDRADLAKYICENQDSISSKLKECCEKPLLEKSHCIAEVENDEMPADLPSLAADFVESKDVCKNYAEAKDVFLGMFLYEYARRHPDYSVVLLLRLAKTYETTLEKCCAAADPHECYAKVFDEFKPLVEEPQNLIKQNCELFEQLGEYKFQNALLVRYTKKVPQVSTPTLVEVSRNLGKVGSKCCKHPEAKRMPCAEDYLSVVLNQLCVLHEKTPVSDRVTKCCTESLVNRRPCFSALEVDETYVPKEFNAETFTFHADICTLSEKERQIKKQTALVELVKHKPKATKEQLKAVMDDFAAFVEKCCKADDKETCFAEEGKKLVAASQAAGGSGGSPLGLAGGGGSGRSDNHGGSGGSEVQLVESGGGLVQPGGSLRLSCAASGFTFNTYAMNWVRQAPGKGLEWVARIRSKYNNYATYYADSVKDRFTISRDDSKNTLYLQMNSLRAEDTAVYYCVRHGNFGNSYVSWFAYWGQGTMVTVSSASTKGPSVFPLAPSSKSTSGGTAALGCLVKDYFPEPVTVSWNSGALTSGVHTFPAVLQSSGLYSLSSVVTVPSSSLGTQTYICNVNHKPSNTKVDKRVEPKSCPPCGGGGSDDIQMTQSPSSLSASVGDRVTITCRASQGISNYLAWFQQKPGKAPKSLIYRANRLQSGVPSRFSGSGSGTDFTLTISSLQPEDVATYYCLQYDDFPWTFGQGTKLEIKGGGGSGGGGSGGGGSGGGGSQVQLVQSGAEVKKPGASVKVSCKASGYTFTSFWMHWVRQAPGQGLEWMGRIDPNRGGTEYNEKAKSRVTMTADKSTSTAYMELSSLRSEDTAVYYCAGGNPYYPMDYWGQGTTVTVSS

SEQ ID NO: 119 - protein, 5 aa, Artificial Sequence
  source: /note="Description of Artificial Sequence: Synthetic linker"
GSGGS

SEQ ID NO: 120 - protein, 4 aa, Artificial Sequence
  source: /note="Description of Artificial Sequence: Synthetic linker"
GGGS

SEQ ID NO: 121 - protein, 4 aa, Artificial Sequence
  source: /note="Description of Artificial Sequence: Synthetic linker"
GGSG

SEQ ID NO: 122 - protein, 5 aa, Artificial Sequence
  source: /note="Description of Artificial Sequence: Synthetic linker"
GGSGG

SEQ ID NO: 123 - protein, 5 aa, Artificial Sequence
  source: /note="Description of Artificial Sequence: Synthetic linker"
GSGSG

SEQ ID NO: 124 - protein, 5 aa, Artificial Sequence
  source: /note="Description of Artificial Sequence: Synthetic linker"
GSGGG

SEQ ID NO: 125 - protein, 5 aa, Artificial Sequence
  source: /note="Description of Artificial Sequence: Synthetic linker"
GGGSG

SEQ ID NO: 126 - protein, 5 aa, Artificial Sequence
  source: /note="Description of Artificial Sequence: Synthetic linker"
GSSSG

SEQ ID NO: 127 - protein, 14 aa, Artificial Sequence
  source: /note="Description of Artificial Sequence: Synthetic linker"
EGKSSGSGSESKVD

SEQ ID NO: 128 - protein, 18 aa, Artificial Sequence
  source: /note="Description of Artificial Sequence: Synthetic linker"
KESGSVSSEQLAQFRSLD

SEQ ID NO: 129 - protein, 5 aa, Artificial Sequence
  source: /note="Description of Artificial Sequence: Synthetic linker"
GGGGS

SEQ ID NO: 130 - protein, 1072 aa, Artificial Sequence
  source: /note="Description of Artificial Sequence: Synthetic HC polypeptide"
EVAHRFKDLGEENFKALVLIAFAQYLQQCPFEDHVKLVNEVTEFAKTCVADESAENCDKSLHTLFGDKLCTVATLRETYGEMADCCAKQEPERNECFLQHKDDNPNLPRLVRPEVDVMCTAFHDNEETFLKKYLYEIARRHPYFYAPELLFFAKRYKAAFTECCQAADKAACLLPKLDELRDEGKASSAKQRLKCASLQKFGERAFKAWAVARLSQRFPKAEFAEVSKLVTDLTKVHTECCHGDLLECADDRADLAKYICENQDSISSKLKECCEKPLLEKSHCIAEVENDEMPADLPSLAADFVESKDVCKNYAEAKDVFLGMFLYEYARRHPDYSVVLLLRLAKTYETTLEKCCAAADPHECYAKVFDEFKPLVEEPQNLIKQNCELFEQLGEYKFQNALLVRYTKKVPQVSTPTLVEVSRNLGKVGSKCCKHPEAKRMPCAEDYLSVVLNQLCVLHEKTPVSDRVTKCCTESLVNRRPCFSALEVDETYVPKEFNAETFTFHADICTLSEKERQIKKQTALVELVKHKPKATKEQLKAVMDDFAAFVEKCCKADDKETCFAEEGKKLVAASQAAGGSGGSPLGLAGGGSGGSEVQLVESGGGLVQPGGSLRLSCAASGFTFNTYAMNWVRQAPGKGLEWVARIRSKYNNYATYYADSVKDRFTISRDDSKNTLYLQMNSLRAEDTAVYYCVRHGNFGNSYVSWFAYWGQGTMVTVSSASTKGPSVFPLAPSSKSTSGGTAALGCLVKDYFPEPVTVSWNSGALTSGVHTFPAVLQSSGLYSLSSVVTVPSSSLGTQTYICNVNHKPSNTKVDKRVEPKSCPPCGGGGSDIQMTQSPSSLSASVGDRVTITCQASQDISNYLNWYQQKPGKAPKLLIYDASNLETGVPSRFSGSGSGTDFTFTISSLQPEDIATYFCQHFDHLPLAFGGGTKVEIKGGGGSGGGGSGGGGSQVQLQESGPGLVKPSETLSLTCTVSGGSVSSGDYYWTWIRQSPGKGLEWIGHIYYSGNTNYNPSLKSRLTISIDTSKTQFSLKLSSVTAADTAIYYCVRDRVTGAFDIWGQGTMVTVSS

SEQ ID NO: 131 - protein, 508 aa, Artificial Sequence
  source: /note="Description of Artificial Sequence: Synthetic LC polypeptide"
QDGNEEMGGITQTPYKVSISGTTVILTGGSGGSPLGLAGGGSGGSQAVVTQEPSLTVSPGGTVTLTCRSSTGAVTTSNYANWVQQKPGQAPRGLIGGTNKRAPGTPARFSGSLLGGKAALTLSGVQPEDEAEYYCALWYSNLWVFGGGTKLTVLGQPKAAPSVTLFPPSSEELQANKATLVCLISDFYPGAVTVAWKADSSPVKAGVETTTPSKQSNNKYAASSYLSLTPEQWKSHRSYSCQVTHEGSTVEKTVAPTECPPCSGGGSDIQMTQSPSSLSASVGDRVTITCQASQDISNYLNWYQQKPGKAPKLLIYDASNLETGVPSRFSGSGSGTDFTFTISSLQPEDIATYFCQHFDHLPLAFGGGTKVEIKGGGGSGGGGSGGGGSQVQLQESGPGLVKPSETLSLTCTVSGGSVSSGDYYWTWIRQSPGKGLEWIGHIYYSGNTNYNPSLKSRLTISIDTSKTQFSLKLSSVTAADTAIYYCVRDRVTGAFDIWGQGTMVTVSS

SEQ ID NO: 132 - protein, 1072 aa, Artificial Sequence
  source: /note="Description of Artificial Sequence: Synthetic HC polypeptide"
EVAHRFKDLGEENFKALVLIAFAQYLQQCPFEDHVKLVNEVTEFAKTCVADESAENCDKSLHTLFGDKLCTVATLRETYGEMADCCAKQEPERNECFLQHKDDNPNLPRLVRPEVDVMCTAFHDNEETFLKKYLYEIARRHPYFYAPELLFFAKRYKAAFTECCQAADKAACLLPKLDELRDEGKASSAKQRLKCASLQKFGERAFKAWAVARLSQRFPKAEFAEVSKLVTDLTKVHTECCHGDLLECADDRADLAKYICENQDSISSKLKECCEKPLLEKSHCIAEVENDEMPADLPSLAADFVESKDVCKNYAEAKDVFLGMFLYEYARRHPDYSVVLLLRLAKTYETTLEKCCAAADPHECYAKVFDEFKPLVEEPQNLIKQNCELFEQLGEYKFQNALLVRYTKKVPQVSTPTLVEVSRNLGKVGSKCCKHPEAKRMPCAEDYLSVVLNQLCVLHEKTPVSDRVTKCCTESLVNRRPCFSALEVDETYVPKEFNAETFTFHADICTLSEKERQIKKQTALVELVKHKPKATKEQLKAVMDDFAAFVEKCCKADDKETCFAEEGKKLVAASQAAGGSGGSPLGLAGGGSGGSEVQLVESGGGLVQPGGSLRLSCAASGFTFNTYAMNWVRQAPGKGLEWVARIRSKYNNYATYYADSVKDRFTISRDDSKNTLYLQMNSLRAEDTAVYYCVRHGNFGNSYVSWFAYWGQGTMVTVSSASTKGPSVFPLAPSSKSTSGGTAALGCLVKDYFPEPVTVSWNSGALTSGVHTFPAVLQSSGLYSLSSVVTVPSSSLGTQTYICNVNHKPSNTKVDKRVEPKSCPPCGGGGSQVQLQESGPGLVKPSETLSLTCTVSGGSVSSGDYYWTWIRQSPGKGLEWIGHIYYSGNTNYNPSLKSRLTISIDTSKTQFSLKLSSVTAADTAIYYCVRDRVTGAFDIWGQGTMVTVSSGGGGSGGGGSGGGGSDIQMTQSPSSLSASVGDRVTITCQASQDISNYLNWYQQKPGKAPKLLIYDASNLETGVPSRFSGSGSGTDFTFTISSLQPEDIATYFCQHFDHLPLAFGGGTKVEIK

SEQ ID NO: 133 - protein, 508 aa, Artificial Sequence
  source: /note="Description of Artificial Sequence: Synthetic LC polypeptide"
QDGNEEMGGITQTPYKVSISGTTVILTGGSGGSPLGLAGGGSGGSQAVVTQEPSLTVSPGGTVTLTCRSSTGAVTTSNYANWVQQKPGQAPRGLIGGTNKRAPGTPARFSGSLLGGKAALTLSGVQPEDEAEYYCALWYSNLWVFGGGTKLTVLGQPKAAPSVTLFPPSSEELQANKATLVCLISDFYPGAVTVAWKADSSPVKAGVETTTPSKQSNNKYAASSYLSLTPEQWKSHRSYSCQVTHEGSTVEKTVAPTECPPCSGGGSQVQLQESGPGLVKPSETLSLTCTVSGGSVSSGDYYWTWIRQSPGKGLEWIGHIYYSGNTNYNPSLKSRLTISIDTSKTQFSLKLSSVTAADTAIYYCVRDRVTGAFDIWGQGTMVTVSSGGGGSGGGGSGGGGSDIQMTQSPSSLSASVGDRVTITCQASQDISNYLNWYQQKPGKAPKLLIYDASNLETGVPSRFSGSGSGTDFTFTISSLQPEDIATYFCQHFDHLPLAFGGGTKVEIK

SEQ ID NO: 134 - protein, 1072 aa, Artificial Sequence
  source: /note="Description of Artificial Sequence: Synthetic HC polypeptide"
EVAHRFKDLGEENFKALVLIAFAQYLQQCPFEDHVKLVNEVTEFAKTCVADESAENCDKSLHTLFGDKLCTVATLRETYGEMADCCAKQEPERNECFLQHKDDNPNLPRLVRPEVDVMCTAFHDNEETFLKKYLYEIARRHPYFYAPELLFFAKRYKAAFTECCQAADKAACLLPKLDELRDEGKASSAKQRLKCASLQKFGERAFKAWAVARLSQRFPKAEFAEVSKLVTDLTKVHTECCHGDLLECADDRADLAKYICENQDSISSKLKECCEKPLLEKSHCIAEVENDEMPADLPSLAADFVESKDVCKNYAEAKDVFLGMFLYEYARRHPDYSVVLLLRLAKTYETTLEKCCAAADPHECYAKVFDEFKPLVEEPQNLIKQNCELFEQLGEYKFQNALLVRYTKKVPQVSTPTLVEVSRNLGKVGSKCCKHPEAKRMPCAEDYLSVVLNQLCVLHEKTPVSDRVTKCCTESLVNRRPCFSALEVDETYVPKEFNAETFTFHADICTLSEKERQIKKQTALVELVKHKPKATKEQLKAVMDDFAAFVEKCCKADDKETCFAEEGKKLVAASQAAGGSGGSGGSGGSGGSGGSEVQLVESGGGLVQPGGSLRLSCAASGFTFNTYAMNWVRQAPGKGLEWVARIRSKYNNYATYYADSVKDRFTISRDDSKNTLYLQMNSLRAEDTAVYYCVRHGNFGNSYVSWFAYWGQGTMVTVSSASTKGPSVFPLAPSSKSTSGGTAALGCLVKDYFPEPVTVSWNSGALTSGVHTFPAVLQSSGLYSLSSVVTVPSSSLGTQTYICNVNHKPSNTKVDKRVEPKSCPPCGGGGSDIQMTQSPSSLSASVGDRVTITCQASQDISNYLNWYQQKPGKAPKLLIYDASNLETGVPSRFSGSGSGTDFTFTISSLQPEDIATYFCQHFDHLPLAFGGGTKVEIKGGGGSGGGGSGGGGSQVQLQESGPGLVKPSETLSLTCTVSGGSVSSGDYYWTWIRQSPGKGLEWIGHIYYSGNTNYNPSLKSRLTISIDTSKTQFSLKLSSVTAADTAIYYCVRDRVTGAFDIWGQGTMVTVSS

SEQ ID NO: 135 - protein, 508 aa, Artificial Sequence
  source: /note="Description of Artificial Sequence: Synthetic LC polypeptide"
QDGNEEMGGITQTPYKVSISGTTVILTGGSGGSGGSGGSGGSGGSQAVVTQEPSLTVSPGGTVTLTCRSSTGAVTTSNYANWVQQKPGQAPRGLIGGTNKRAPGTPARFSGSLLGGKAALTLSGVQPEDEAEYYCALWYSNLWVFGGGTKLTVLGQPKAAPSVTLFPPSSEELQANKATLVCLISDFYPGAVTVAWKADSSPVKAGVETTTPSKQSNNKYAASSYLSLTPEQWKSHRSYSCQVTHEGSTVEKTVAPTECPPCSGGGSDIQMTQSPSSLSASVGDRVTITCQASQDISNYLNWYQQKPGKAPKLLIYDASNLETGVPSRFSGSGSGTDFTFTISSLQPEDIATYFCQHFDHLPLAFGGGTKVEIKGGGGSGGGGSGGGGSQVQLQESGPGLVKPSETLSLTCTVSGGSVSSGDYYWTWIRQSPGKGLEWIGHIYYSGNTNYNPSLKSRLTISIDTSKTQFSLKLSSVTAADTAIYYCVRDRVTGAFDIWGQGTMVTVSS

SEQ ID NO: 136 - protein, 1072 aa, Artificial Sequence
  source: /note="Description of Artificial Sequence: Synthetic HC polypeptide"
EVAHRFKDLGEENFKALVLIAFAQYLQQCPFEDHVKLVNEVTEFAKTCVADESAENCDKSLHTLFGDKLCTVATLRETYGEMADCCAKQEPERNECFLQHKDDNPNLPRLVRPEVDVMCTAFHDNEETFLKKYLYEIARRHPYFYAPELLFFAKRYKAAFTECCQAADKAACLLPKLDELRDEGKASSAKQRLKCASLQKFGERAFKAWAVARLSQRFPKAEFAEVSKLVTDLTKVHTECCHGDLLECADDRADLAKYICENQDSISSKLKECCEKPLLEKSHCIAEVENDEMPADLPSLAADFVESKDVCKNYAEAKDVFLGMFLYEYARRHPDYSVVLLLRLAKTYETTLEKCCAAADPHECYAKVFDEFKPLVEEPQNLIKQNCELFEQLGEYKFQNALLVRYTKKVPQVSTPTLVEVSRNLGKVGSKCCKHPEAKRMPCAEDYLSVVLNQLCVLHEKTPVSDRVTKCCTESLVNRRPCFSALEVDETYVPKEFNAETFTFHADICTLSEKERQIKKQTALVELVKHKPKATKEQLKAVMDDFAAFVEKCCKADDKETCFAEEGKKLVAASQAAGGSGGSGGSGGSGGSGGSEVQLVESGGGLVQPGGSLRLSCAASGFTFNTYAMNWVRQAPGKGLEWVARIRSKYNNYATYYADSVKDRFTISRDDSKNTLYLQMNSLRAEDTAVYYCVRHGNFGNSYVSWFAYWGQGTMVTVSSASTKGPSVFPLAPSSKSTSGGTAALGCLVKDYFPEPVTVSWNSGALTSGVHTFPAVLQSSGLYSLSSVVTVPSSSLGTQTYICNVNHKPSNTKVDKRVEPKSCPPCGGGGSQVQLQESGPGLVKPSETLSLTCTVSGGSVSSGDYYWTWIRQSPGKGLEWIGHIYYSGNTNYNPSLKSRLTISIDTSKTQFSLKLSSVTAADTAIYYCVRDRVTGAFDIWGQGTMVTVSSGGGGSGGGGSGGGGSDIQMTQSPSSLSASVGDRVTITCQASQDISNYLNWYQQKPGKAPKLLIYDASNLETGVPSRFSGSGSGTDFTFTISSLQPEDIATYFCQHFDHLPLAFGGGTKVEIK

SEQ ID NO: 137 - protein, 508 aa, Artificial Sequence
  source: /note="Description of Artificial Sequence: Synthetic LC polypeptide"
QDGNEEMGGITQTPYKVSISGTTVILTGGSGGSGGSGGSGGSGGSQAVVTQEPSLTVSPGGTVTLTCRSSTGAVTTSNYANWVQQKPGQAPRGLIGGTNKRAPGTPARFSGSLLGGKAALTLSGVQPEDEAEYYCALWYSNLWVFGGGTKLTVLGQPKAAPSVTLFPPSSEELQANKATLVCLISDFYPGAVTVAWKADSSPVKAGVETTTPSKQSNNKYAASSYLSLTPEQWKSHRSYSCQVTHEGSTVEKTVAPTECPPCSGGGSQVQLQESGPGLVKPSETLSLTCTVSGGSVSSGDYYWTWIRQSPGKGLEWIGHIYYSGNTNYNPSLKSRLTISIDTSKTQFSLKLSSVTAADTAIYYCVRDRVTGAFDIWGQGTMVTVSSGGGGSGGGGSGGGGSDIQMTQSPSSLSASVGDRVTITCQASQDISNYLNWYQQKPGKAPKLLIYDASNLETGVPSRFSGSGSGTDFTFTISSLQPEDIATYFCQHFDHLPLAFGGGTKVEIK

SEQ ID NO: 138 - protein, 483 aa, Artificial Sequence
  source: /note="Description of Artificial Sequence: Synthetic HC polypeptide"
GGSGGSEVQLVESGGGLVQPGGSLRLSCAASGFTFNTYAMNWVRQAPGKGLEWVARIRSKYNNYATYYADSVKDRFTISRDDSKNTLYLQMNSLRAEDTAVYYCVRHGNFGNSYVSWFAYWGQGTMVTVSSASTKGPSVFPLAPSSKSTSGGTAALGCLVKDYFPEPVTVSWNSGALTSGVHTFPAVLQSSGLYSLSSVVTVPSSSLGTQTYICNVNHKPSNTKVDKRVEPKSCPPCGGGGSDIQMTQSPSSLSASVGDRVTITCQASQDISNYLNWYQQKPGKAPKLLIYDASNLETGVPSRFSGSGSGTDFTFTISSLQPEDIATYFCQHFDHLPLAFGGGTKVEIKGGGGSGGGGSGGGGSQVQLQESGPGLVKPSETLSLTCTVSGGSVSSGDYYWTWIRQSPGKGLEWIGHIYYSGNTNYNPSLKSRLTISIDTSKTQFSLKLSSVTAADTAIYYCVRDRVTGAFDIWGQGTMVTVSS

SEQ ID NO: 139 - protein, 469 aa, Artificial Sequence; identical to SEQ ID NO: 32
  source: /note="Description of Artificial Sequence: Synthetic LC polypeptide"

SEQ ID NO: 140 - protein, 483 aa, Artificial Sequence
  source: /note="Description of Artificial Sequence: Synthetic HC polypeptide"
GGSGGSEVQLVESGGGLVQPGGSLRLSCAASGFTFNTYAMNWVRQAPGKGLEWVARIRSKYNNYATYYADSVKDRFTISRDDSKNTLYLQMNSLRAEDTAVYYCVRHGNFGNSYVSWFAYWGQGTMVTVSSASTKGPSVFPLAPSSKSTSGGTAALGCLVKDYFPEPVTVSWNSGALTSGVHTFPAVLQSSGLYSLSSVVTVPSSSLGTQTYICNVNHKPSNTKVDKRVEPKSCPPCGGGGSQVQLQESGPGLVKPSETLSLTCTVSGGSVSSGDYYWTWIRQSPGKGLEWIGHIYYSGNTNYNPSLKSRLTISIDTSKTQFSLKLSSVTAADTAIYYCVRDRVTGAFDIWGQGTMVTVSSGGGGSGGGGSGGGGSDIQMTQSPSSLSASVGDRVTITCQASQDISNYLNWYQQKPGKAPKLLIYDASNLETGVPSRFSGSGSGTDFTFTISSLQPEDIATYFCQHFDHLPLAFGGGTKVEIK

SEQ ID NO: 141 - protein, 469 aa, Artificial Sequence
  source: /note="Description of Artificial Sequence: Synthetic LC polypeptide"
GGSGGSQAVVTQEPSLTVSPGGTVTLTCRSSTGAVTTSNYANWVQQKPGQAPRGLIGGTNKRAPGTPARFSGSLLGGKAALTLSGVQPEDEAEYYCALWYSNLWVFGGGTKLTVLGQPKAAPSVTLFPPSSEELQANKATLVCLISDFYPGAVTVAWKADSSPVKAGVETTTPSKQSNNKYAASSYLSLTPEQWKSHRSYSCQVTHEGSTVEKTVAPTECPPCSGGGSQVQLQESGPGLVKPSETLSLTCTVSGGSVSSGDYYWTWIRQSPGKGLEWIGHIYYSGNTNYNPSLKSRLTISIDTSKTQFSLKLSSVTAADTAIYYCVRDRVTGAFDIWGQGTMVTVSSGGGGSGGGGSGGGGSDIQMTQSPSSLSASVGDRVTITCQASQDISNYLNWYQQKPGKAPKLLIYDASNLETGVPSRFSGSGSGTDFTFTISSLQPEDIATYFCQHFDHLPLAFGGGTKVEIK

SEQ ID NO: 142 - DNA, 3219 bp, Artificial Sequence
  source: /note="Description of Artificial Sequence: Synthetic HC polypeptide"
gaggtggcccacaggttcaaggatctgggcgaggagaacttcaaggccctggtgctgatcgccttcgcccagtatctgcagcagtgcccctttgaggaccacgtgaagctggtgaacgaggtgaccgagttcgccaagacatgcgtggccgacgagtccgccgagaattgtgataagtctctgcacaccctgtttggcgataagctgtgcaccgtggccacactgagggagacatacggcgagatggccgactgctgtgccaagcaggagcccgagcgcaacgagtgcttcctgcagcacaaggacgataaccctaatctgccacggctggtgagacctgaggtggacgtgatgtgcaccgccttccacgataatgaggagacatttctgaagaagtacctgtatgagatcgcccggagacacccttacttttatgccccagagctgctgttctttgccaagcggtacaaggcagccttcaccgagtgctgtcaggcagcagataaggcagcatgcctgctgccaaagctggacgagctgagggatgagggcaaggcaagctccgccaagcagcgcctgaagtgtgcaagcctgcagaagttcggagagagggcctttaaggcatgggcagtggcaaggctgtcccagcggttcccaaaggccgagtttgccgaggtgtctaagctggtgaccgacctgacaaaggtgcacaccgagtgctgtcacggcgacctgctggagtgcgcagacgatagagccgatctggccaagtacatctgtgagaaccaggactctatctctagcaagctgaaggagtgctgtgagaagcccctgctggagaagtcccactgcatcgccgaggtggagaacgacgagatgccagcagatctgccaagcctggcagcagacttcgtggagtccaaggacgtgtgcaagaattacgccgaggccaaggacgtgttcctgggcatgtttctgtacgagtatgccaggcgccaccctgactactccgtggtgctgctgctgcggctggccaagacctatgagaccacactggagaagtgctgtgccgccgccgacccccacgagtgctatgcaaaggtgttcgacgagtttaagcccctggtggaggagcctcagaacctgatcaagcagaattgtgagctgtttgagcagctgggcgagtacaagttccagaacgccctgctggtgagatataccaagaaggtgccacaggtgtctacccccacactggtggaggtgagccggaatctgggcaaggtcggctccaagtgctgtaagcaccctgaggccaagagaatgccatgcgccgaggattacctgtccgtggtgctgaaccagctgtgcgtgctgcacgagaagacccccgtgagcgacagggtgaccaagtgctgtacagagtctctggtgaaccggagaccatgctttagcgccctggaggtggatgagacatatgtgcccaaggagttcaatgccgagaccttcacatttcacgccgacatctgtaccctgagcgagaaggagcgccagatcaagaagcagacagccctggtggagctggtgaagcacaagccaaaggccaccaaggagcagctgaaggccgtgatggacgatttcgccgcctttgtggagaagtgctgtaaggccgacgataaggagacatgcttcgcagaggagggcaagaagctggtggcagcaagccaggcagcaggaggctccggcggctctccactgggcctggccggcggcggcagcggcggctccgaggtgcagctggtggagtccggcggcggcctggtgcagcccggcggcagcctgaggctgtcctgcgccgcctctggcttcacctttaacacatacgcaatgaattgggtgcgccaggcaccaggcaagggactggagtgggtggcccggatcagaagcaagtacaacaattatgccacctactatgccgactccgtgaaggatcggtttaccatcagcagagacgattccaagaacacactgtatctgcagatgaatagcctgcgggccgaggatacagccgtgtactattgcgtgagacacggcaactttggcaattcttacgtgagctggttcgcctattggggccagggcaccatggtgacagtgtcctctgcctctaccaagggacctagcgtgttcccactggcacctagctccaagtctaccagcggaggcacagccgccctgggatgtctggtgaaggactactttccagagcccgtgacagtgtcctggaactctggcgccctgaccagcggagtgcacacattccctgccgtgctgcagtctagcggcctgtactccctgtcctctgtggtgaccgtgccaagctcctctctgggcacccagacatatatctgcaacgtgaatcacaagccctctaatacaaaggtggacaagagggtggagcctaagagctgccccccttgtggcggaggcggtagcgatatccagatgacccaaagccccagtagcctgtccgccagtgtaggagatagggtaaccatcacttgccaagcgagccaagacatcagcaactacctgaattggtatcagcagaagcccggcaaagcacccaagctcctgatctacgacgccagcaatctggagaccggcgtgcccagcaggttcagcggatctggtagcggcaccgacttcaccttcaccataagtagtctgcagcccgaggacatcgccacctacttctgtcagcacttcgatcacctgcccctggccttcggcggtgggaccaaggtggagatcaagggtgggggtggcagcgggggaggcggaagcggcggaggtggctcttgccaggtgcagcttcaagagagcggacccggcctcgtgaagcccagcgagaccttgagcctgacctgcactgtgagtggcggtagcgtgagcagcggcgactattactggacctggatcaggcagagccctggcaaggggctggagtggatcggccacatctactacagcgggaacacgaactacaaccccagcctgaagagcaggctgacgatcagcatcgacacgagcaagacccagttctcacttaagctcagcagcgtgaccgccgcagacaccgccatatactactgcgtgagggacagggtgacgggcgctttcgacatctggggccaaggcacaatggtcacggtgagctcc

SEQ ID NO: 143 - DNA, 1524 bp, Artificial Sequence
  source: /note="Description of Artificial Sequence: Synthetic LC polypeptide"
caggacggcaacgaggagatgggcggcatcacccagacaccatacaaggtgagcatctccggcaccacagtgatcctgaccggaggctccggcggctctccactgggcctggccggcggcggcagcggcggctcccaagccgtggtaacccaggagcccagtctgacagtgagccctggcggtacagtgaccttgacttgcaggagcagtaccggagccgtaactacctcaaactacgccaactgggtgcagcagaagcccggtcaggcccccaggggccttattggtgggactaacaaacgagcacccggaacccccgcaaggttcagcggcagccttctgggcggaaaggccgctctcacattgagcggcgtgcagcccgaggacgaggccgagtactactgcgccctgtggtacagcaacctgtgggtgttcggcggagggaccaagctgaccgtgctgggccagcccaaagctgcgccgagcgtgaccctgttccccccgtcaagcgaggagctgcaggctaacaaggccaccctggtgtgcctgattagtgacttctaccccggtgccgtcaccgtggcctggaaggccgacagtagcccagttaaagcgggcgtcgagaccaccactcccagcaagcagagcaacaacaagtacgccgcgagcagctacctgagtctgacccccgagcagtggaagagccacaggagctacagctgccaggtgacccacgagggcagcactgtggagaagactgtggccccgaccgagtgccccccatgtagcggcggagggtccgatatccagatgacccaaagccccagtagcctgtccgccagtgtaggagatagggtaaccatcacttgccaagcgagccaagacatcagcaactacctgaattggtatcagcagaagcccggcaaagcacccaagctcctgatctacgacgccagcaatctggagaccggcgtgcccagcaggttcagcggatctggtagcggcaccgacttcaccttcaccataagtagtctgcagcccgaggacatcgccacctacttctgtcagcacttcgatcacctgcccctggccttcggcggtgggaccaaggtggagatcaagggtgggggtggcagcgggggaggcggaagcggcggaggtggctctcaggtgcagcttcaagagagcggacccggcctcgtgaagcccagcgagaccttgagcctgacctgcactgtgagtggcggtagcgtgagcagcggcgactattactggacctggatcaggcagagccctggcaaggggctggagtggatcggccacatctactacagcgggaacacgaactacaaccccagcctgaagagcaggctgacgatcagcatcgacacgagcaagacccagttctcacttaagctcagcagcgtgaccgccgcagacaccgccatatactactgcgtgagggacagggtgacgggcgctttcgacatctggggccaaggcacaatggtcacggtgagctcc

SEQ ID NO: 144 - DNA, 3216 bp, Artificial Sequence
  source: /note="Description of Artificial Sequence: Synthetic HC polypeptide"
gaggtggcccacaggttcaaggatctgggcgaggagaacttcaaggccctggtgctgatcgccttcgcccagtatctgcagcagtgcccctttgaggaccacgtgaagctggtgaacgaggtgaccgagttcgccaagacatgcgtggccgacgagtccgccgagaattgtgataagtctctgcacaccctgtttggcgataagctgtgcaccgtggccacactgagggagacatacggcgagatggccgactgctgtgccaagcaggagcccgagcgcaacgagtgcttcctgcagcacaaggacgataaccctaatctgccacggctggtgagacctgaggtggacgtgatgtgcaccgccttccacgataatgaggagacatttctgaagaagtacctgtatgagatcgcccggagacacccttacttttatgccccagagctgctgttctttgccaagcggtacaaggcagccttcaccgagtgctgtcaggcagcagataaggcagcatgcctgctgccaaagctggacgagctgagggatgagggcaaggcaagctccgccaagcagcgcctgaagtgtgcaagcctgcagaagttcggagagagggcctttaaggcatgggcagtggcaaggctgtcccagcggttcccaaaggccgagtttgccgaggtgtctaagctggtgaccgacctgacaaaggtgcacaccgagtgctgtcacggcgacctgctggagtgcgcagacgatagagccgatctggccaagtacatctgtgagaaccaggactctatctctagcaagctgaaggagtgctgtgagaagcccctgctggagaagtcccactgcatcgccgaggtggagaacgacgagatgccagcagatctgccaagcctggcagcagacttcgtggagtccaaggacgtgtgcaagaattacgccgaggccaaggacgtgttcctgggcatgtttctgtacgagtatgccaggcgccaccctgactactccgtggtgctgctgctgcggctggccaagacctatgagaccacactggagaagtgctgtgccgccgccgacccccacgagtgctatgcaaaggtgttcgacgagtttaagcccctggtggaggagcctcagaacctgatcaagcagaattgtgagctgtttgagcagctgggcgagtacaagttccagaacgccctgctggtgagatataccaagaaggtgccacaggtgtctacccccacactggtggaggtgagccggaatctgggcaaggtcggctccaagtgctgtaagcaccctgaggccaagagaatgccatgcgccgaggattacctgtccgtggtgctgaaccagctgtgcgtgctgcacgagaagacccccgtgagcgacagggtgaccaagtgctgtacagagtctctggtgaaccggagaccatgctttagcgccctggaggtggatgagacatatgtgcccaaggagttcaatgccgagaccttcacatttcacgccgacatctgtaccctgagcgagaaggagcgccagatcaagaagcagacagccctggtggagctggtgaagcacaagccaaaggccaccaaggagcagctgaaggccgtgatggacgatttcgccgcctttgtggagaagtgctgtaaggccgacgataaggagacatgcttcgcagaggagggcaagaagctggtggcagcaagccaggcagcaggaggctccggcggctctccactgggcctggccggcggcggcagcggcggctccgaggtgcagctggtggagtccggcggcggcctggtgcagcccggcggcagcctgaggctgtcctgcgccgcctctggcttcacctttaacacatacgcaatgaattgggtgcgccaggcaccaggcaagggactggagtgggtggcccggatcagaagcaagtacaacaattatgccacctactatgccgactccgtgaaggatcggtttaccatcagcagagacgattccaagaacacactgtatctgcagatgaatagcctgcgggccgaggatacagccgtgtactattgcgtgagacacggcaactttggcaattcttacgtgagctggttcgcctattggggccagggcaccatggtgacagtgtcctctgcctctaccaagggacctagcgtgttcccactggcacctagctccaagtctaccagcggaggcacagccgccctgggatgtctggtgaaggactactttccagagcccgtgacagtgtcctggaactctggcgccctgaccagcggagtgcacacattccctgccgtgctgcagtctagcggcctgtactccctgtcctctgtggtgaccgtgccaagctcctctctgggcacccagacatatatctgcaacgtgaatcacaagccctctaatacaaaggtggacaagagggtggagcctaagagctgccccccttgtggcggaggcggtagccaggtgcagcttcaagagagcggacccggcctcgtgaagcccagcgagaccttgagcctgacctgcactgtgagtggcggtagcgtgagcagcggcgactattactggacctggatcaggcagagccctggcaaggggctggagtggatcggccacatctactacagcgggaacacgaactacaaccccagcctgaagagcaggctgacgatcagcatcgacacgagcaagacccagttctcacttaagctcagcagcgtgaccgccgcagacaccgccatatactactgcgtgagggacagggtgacgggcgctttcgacatctggggccaaggcacaatggtcacggtgagctccggtgggggtggcagcgggggaggcggaagcggcggaggtggctctgatatccagatgacccaaagccccagtagcctgtccgccagtgtaggagatagggtaaccatcacttgccaagcgagccaagacatcagcaactacctgaattggtatcagcagaagcccggcaaagcacccaagctcctgatctacgacgccagcaatctggagaccggcgtgcccagcaggttcagcggatctggtagcggcaccgacttcaccttcaccataagtagtctgcagcccgaggacatcgccacctacttctgtcagcacttcgatcacctgcccctggccttcggcggtgggaccaaggtggagatcaag

SEQ ID NO: 145 - DNA, 1524 bp, Artificial Sequence
  source: /note="Description of Artificial Sequence: Synthetic LC polypeptide"
caggacggcaacgaggagatgggcggcatcacccagacaccatacaaggtgagcatctccggcaccacagtgatcctgaccggaggctccggcggctctccactgggcctggccggcggcggcagcggcggctcccaagccgtggtaacccaggagcccagtctgacagtgagccctggcggtacagtgaccttgacttgcaggagcagtaccggagccgtaactacctcaaactacgccaactgggtgcagcagaagcccggtcaggcccccaggggccttattggtgggactaacaaacgagcacccggaacccccgcaaggttcagcggcagccttctgggcggaaaggccgctctcacattgagcggcgtgcagcccgaggacgaggccgagtactactgcgccctgtggtacagcaacctgtgggtgttcggcggagggaccaagctgaccgtgctgggccagcccaaagctgcgccgagcgtgaccctgttccccccgtcaagcgaggagctgcaggctaacaaggccaccctggtgtgcctgattagtgacttctaccccggtgccgtcaccgtggcctggaaggccgacagtagcccagttaaagcgggcgtcgagaccaccactcccagcaagcagagcaacaacaagtacgccgcgagcagctacctgagtctgacccccgagcagtggaagagccacaggagctacagctgccaggtgacccacgagggcagcactgtggagaagactgtggccccgaccgagtgccccccatgtagcggcggagggtcccaggtgcagcttcaagagagcggacccggcctcgtgaagcccagcgagaccttgagcctgacctgcactgtgagtggcggtagcgtgagcagcggcgactattactggacctggatcaggcagagccctggcaaggggctggagtggatcggccacatctactacagcgggaacacgaactacaaccccagcctgaagagcaggctgacgatcagcatcgacacgagcaagacccagttctcacttaagctcagcagcgtgaccgccgcagacaccgccatatactactgcgtgagggacagggtgacgggcgctttcgacatctggggccaaggcacaatggtcacggtgagctccggtgggggtggcagcgggggaggcggaagcggcggaggtggctctgatatccagatgacccaaagccccagtagcctgtccgccagtgtaggagatagggtaaccatcacttgccaagcgagccaagacatcagcaactacctgaattggtatcagcagaagcccggcaaagcacccaagctcctgatctacgacgccagcaatctggagaccggcgtgcccagcaggttcagcggatctggtagcggcaccgacttcaccttcaccataagtagtctgcagcccgaggacatcgccacctacttctgtcagcacttcgatcacctgcccctggccttcggcggtgggaccaaggtggagatcaag

SEQ ID NO: 146 - DNA, 3216 bp, Artificial Sequence
  source: /note="Description of Artificial Sequence: Synthetic HC polypeptide"
gaggtggcccacaggttcaaggatctgggcgaggagaacttcaaggccctggtgctgatcgccttcgcccagtatctgcagcagtgcccctttgaggaccacgtgaagctggtgaacgaggtgaccgagttcgccaagacatgcgtggccgacgagtccgccgagaattgtgataagtctctgcacaccctgtttggcgataagctgtgcaccgtggccacactgagggagacatacggcgagatggccgactgctgtgccaagcaggagcccgagcgcaacgagtgcttcctgcagcacaaggacgataaccctaatctgccacggctggtgagacctgaggtggacgtgatgtgcaccgccttccacgataatgaggagacatttctgaagaagtacctgtatgagatcgcccggagacacccttacttttatgccccagagctgctgttctttgccaagcggtacaaggcagccttcaccgagtgctgtcaggcagcagataaggcagcatgcctgctgccaaagctggacgagctgagggatgagggcaaggcaagctccgccaagcagcgcctgaagtgtgcaagcctgcagaagttcggagagagggcctttaaggcatgggcagtggcaaggctgtcccagcggttcccaaaggccgagtttgccgaggtgtctaagctggtgaccgacctgacaaaggtgcacaccgagtgctgtcacggcgacctgctggagtgcgcagacgatagagccgatctggccaagtacatctgtgagaaccaggactctatctctagcaagctgaaggagtgctgtgagaagcccctgctggagaagtcccactgcatcgccgaggtggagaacgacgagatgccagcagatctgccaagcctggcagcagacttcgtggagtccaaggacgtgtgcaagaattacgccgaggccaaggacgtgttcctgggcatgtttctgtacgagtatgccaggcgccaccctgactactccgtggtgctgctgctgcggctggccaagacctatgagaccacactggagaagtgctgtgccgccgccgacccccacgagtgctatgcaaaggtgttcgacgagtttaagcccctggtggaggagcctcagaacctgatcaagcagaattgtgagctgtttgagcagctgggcgagtacaagttccagaacgccctgctggtgagatataccaagaaggtgccacaggtgtctacccccacactggtggaggtgagccggaatctgggcaaggtcggctccaagtgctgtaagcaccctgaggccaagagaatgccatgcgccgaggattacctgtccgtggtgctgaaccagctgtgcgtgctgcacgagaagacccccgtgagcgacagggtgaccaagtgctgtacagagtctctggtgaaccggagaccatgctttagcgccctggaggtggatgagacatatgtgcccaaggagttcaatgccgagaccttcacatttcacgccgacatctgtaccctgagcgagaaggagcgccagatcaagaagcagacagccctggtggagctggtgaagcacaagccaaaggccaccaaggagcagctgaaggccgtgatggacgatttcgccgcctttgtggagaagtgctgtaaggccgacgataaggagacatgcttcgcagaggagggcaagaagctggtggcagcaagccaggcagcaggaggctccggcggctctgggggcagcggaggtagtggcggcagcggcggctccgaggtgcagctggtggagtccggcggcggcctggtgcagcccggcggcagcctgaggctgtcctgcgccgcctctggcttcacctttaacacatacgcaatgaattgggtgcgccaggcaccaggcaagggactggagtgggtggcccggatcagaagcaagtacaacaattatgccacctactatgccgactccgtgaaggatcggtttaccatcagcagagacgattccaagaacacactgtatctgcagatgaatagcctgcgggccgaggatacagccgtgtactattgcgtgagacacggcaactttggcaattcttacgtgagctggttcgcctattggggccagggcaccatggtgacagtgtcctctgcctctaccaagggacctagcgtgttcccactggcacctagctccaagtctaccagcggaggcacagccgccctgggatgtctggtgaaggactactttccagagcccgtgacagtgtcctggaactctggcgccctgaccagcggagtgcacacattccctgccgtgctgcagtctagcggcctgtactccctgtcctctgtggtgaccgtgccaagctcctctctgggcacccagacatatatctgcaacgtgaatcacaagccctctaatacaaaggtggacaagagggtggagcctaagagctgccccccttgtggcggaggcggtagcgatatccagatgacccaaagccccagtagcctgtccgccagtgtaggagatagggtaaccatcacttgccaagcgagccaagacatcagcaactacctgaattggtatcagcagaagcccggcaaagcacccaagctcctgatctacgacgccagcaatctggagaccggcgtgcccagcaggttcagcggatctggtagcggcaccgacttcaccttcaccataagtagtctgcagcccgaggacatcgccacctacttctgtcagcacttcgatcacctgcccctggccttcggcggtgggaccaaggtggagatcaagggtgggggtggcagcgggggaggcggaagcggcggaggtggctctcaggtgcagcttcaagagagcggacccggcctcgtgaagcccagcgagaccttgagcctgacctgcactgtgagtggcggtagcgtgagcagcggcgactattactggacctggatcaggcagagccctggcaaggggctggagtggatcggccacatctactacagcgggaacacgaactacaaccccagcctgaagagcaggctgacgatcagcatcgacacgagcaagacccagttctcacttaagctcagcagcgtgaccgccgcagacaccgccatatactactgcgtgagggacagggtgacgggcgctttcgacatctggggccaaggcacaatggtcacggtgagctcc

SEQ ID NO: 147 - DNA, 1524 bp, Artificial Sequence
  source: /note="Description of Artificial Sequence: Synthetic LC polypeptide"
caggacggcaacgaggagatgggcggcatcacccagacaccatacaaggtgagcatctccggcaccacagtgatcctgaccggaggctccggcggctctgggggcagcggaggtagtggcggcagcggcggctcccaagccgtggtaacccaggagcccagtctgacagtgagccctggcggtacagtgaccttgacttgcaggagcagtaccggagccgtaactacctcaaactacgccaactgggtgcagcagaagcccggtcaggcccccaggggccttattggtgggactaacaaacgagcacccggaacccccgcaaggttcagcggcagccttctgggcggaaaggccgctctcacattgagcggcgtgcagcccgaggacgaggccgagtactactgcgccctgtggtacagcaacctgtgggtgttcggcggagggaccaagctgaccgtgctgggccagcccaaagctgcgccgagcgtgaccctgttccccccgtcaagcgaggagctgcaggctaacaaggccaccctggtgtgcctgattagtgacttctaccccggtgccgtcaccgtggcctggaaggccgacagtagcccagttaaagcgggcgtcgagaccaccactcccagcaagcagagcaacaacaagtacgccgcgagcagctacctgagtctgacccccgagcagtggaagagccacaggagctacagctgccaggtgacccacgagggcagcactgtggagaagactgtggccccgaccgagtgccccccatgtagcggcggagggtccgatatccagatgacccaaagccccagtagcctgtccgccagtgtaggagatagggtaaccatcacttgccaagcgagccaagacatcagcaactacctgaattggtatcagcagaagcccggcaaagcacccaagctcctgatctacgacgccagcaatctggagaccggcgtgcccagcaggttcagcggatctggtagcggcaccgacttcaccttcaccataagtagtctgcagcccgaggacatcgccacctacttctgtcagcacttcgatcacctgcccctggccttcggcggtgggaccaaggtggagatcaagggtgggggtggcagcgggggaggcggaagcggcggaggtggctctcaggtgcagcttcaagagagcggacccggcctcgtgaagcccagcgagaccttgagcctgacctgcactgtgagtggcggtagcgtgagcagcggcgactattactggacctggatcaggcagagccctggcaaggggctggagtggatcggccacatctactacagcgggaacacgaactacaaccccagcctgaagagcaggctgacgatcagcatcgacacgagcaagacccagttctcacttaagctcagcagcgtgaccgccgcagacaccgccatatactactgcgtgagggacagggtgacgggcgctttcgacatctggggccaaggcacaatggtcacggtgagctcc

SEQ ID NO: 148 - DNA, 3216 bp, Artificial Sequence
  source: /note="Description of Artificial Sequence: Synthetic HC polypeptide"
gaggtggcccacaggttcaaggatctgggcgaggagaacttcaaggccctggtgctgatcgccttcgcccagtatctgcagcagtgcccctttgaggaccacgtgaagctggtgaacgaggtgaccgagttcgccaagacatgcgtggccgacgagtccgccgagaattgtgataagtctctgcacaccctgtttggcgataagctgtgcaccgtggccacactgagggagacatacggcgagatggccgactgctgtgccaagcaggagcccgagcgcaacgagtgcttcctgcagcacaaggacgataaccctaatctgccacggctggtgagacctgaggtggacgtgatgtgcaccgccttccacgataatgaggagacatttctgaagaagtacctgtatgagatcgcccggagacacccttacttttatgccccagagctgctgttctttgccaagcggtacaaggcagccttcaccgagtgctgtcaggcagcagataaggcagcatgcctgctgccaaagctggacgagctgagggatgagggcaaggcaagctccgccaagcagcgcctgaagtgtgcaagcctgcagaagttcggagagagggcctttaaggcatgggcagtggcaaggctgtcccagcggttcccaaaggccgagtttgccgaggtgtctaagctggtgaccgacctgacaaaggtgcacaccgagtgctgtcacggcgacctgctggagtgcgcagacgatagagccgatctggccaagtacatctgtgagaaccaggactctatctctagcaagctgaaggagtgctgtgagaagcccctgctggagaagtcccactgcatcgccgaggtggagaacgacgagatgccagcagatctgccaagcctggcagcagacttcgtggagtccaaggacgtgtgcaagaattacgccgaggccaaggacgtgttcctgggcatgtttctgtacgagtatgccaggcgccaccctgactactccgtggtgctgctgctgcggctggccaagacctatgagaccacactggagaagtgctgtgccgccgccgacccccacgagtgctatgcaaaggtgttcgacgagtttaagcccctggtggaggagcctcagaacctgatcaagcagaattgtgagctgtttgagcagctgggcgagtacaagttccagaacgccctgctggtgagatataccaagaaggtgccacaggtgtctacccccacactggtggaggtgagccggaatctgggcaaggtcggctccaagtgctgtaagcaccctgaggccaagagaatgccatgcgccgaggattacctgtccgtggtgctgaaccagctgtgcgtgctgcacgagaagacccccgtgagcgacagggtgaccaagtgctgtacagagtctctggtgaaccggagaccatgctttagcgccctggaggtggatgagacatatgtgcccaaggagttcaatgccgagaccttcacatttcacgccgacatctgtaccctgagcgagaaggagcgccagatcaagaagcagacagccctggtggagctggtgaagcacaagccaaaggccaccaaggagcagctgaaggccgtgatggacgatttcgccgcctttgtggagaagtgctgtaaggccgacgataaggagacatgcttcgcagaggagggcaagaagctggtggcagcaagccaggcagcaggaggctccggcggctctgggggcagcggaggtagtggcggcagcggcggctccgaggtgcagctggtggagtccggcggcggcctggtgcagcccggcggcagcctgaggctgtcctgcgccgcctctggcttcacctttaacacatacgcaatgaattgggtgcgccaggcaccaggcaagggactggagtgggtggcccggatcagaagcaagtacaacaattatgccacctactatgccgactccgtgaaggatcggtttaccatcagcagagacgattccaagaacacactgtatctgcagatgaatagcctgcgggccgaggatacagccgtgtactattgcgtgagacacggcaactttggcaattcttacgtgagctggttcgcctattggggccagggcaccatggtgacagtgtcctctgcctctaccaagggacctagcgtgttcccactggcacctagctccaagtctaccagcggaggcacagccgccctgggatgtctggtgaaggactactttccagagcccgtgacagtgtcctggaactctggcgccctgaccagcggagtgcacacattccctgccgtgctgcagtctagcggcctgtactccctgtcctctgtggtgaccgtgccaagctcctctctgggcacccagacatatatctgcaacgtgaatcacaagccctctaatacaaaggtggacaagagggtggagcctaagagctgccccccttgtggcggaggcggtagccaggtgcagcttcaagagagcggacccggcctcgtgaagcccagcgagaccttgagcctgacctgcactgtgagtggcggtagcgtgagcagcggcgactattactggacctggatcaggcagagccctggcaaggggctggagtggatcggccacatctactacagcgggaacacgaactacaaccccagcctgaagagcaggctgacgatcagcatcgacacgagcaagacccagttctcacttaagctcagcagcgtgaccgccgcagacaccgccatatactactgcgtgagggacagggtgacgggcgctttcgacatctggggccaaggcacaatggtcacggtgagctccggtgggggtggcagcgggggaggcggaagcggcggaggtggctctgatatccagatgacccaaagccccagtagcctgtccgccagtgtaggagatagggtaaccatcacttgccaagcgagccaagacatcagcaactacctgaattggtatcagcagaagcccggcaaagcacccaagctcctgatctacgacgccagcaatctggagaccggcgtgcccagcaggttcagcggatctggtagcggcaccgacttcaccttcaccataagtagtctgcagcccgaggacatcgccacctacttctgtcagcacttcgatcacctgcccctggccttcggcggtgggaccaaggtggagatcaag

SEQ ID NO: 149 - DNA, 1524 bp, Artificial Sequence
  source: /note="Description of Artificial Sequence: Synthetic LC polypeptide"
caggacggcaacgaggagatgggcggcatcacccagacaccatacaaggtgagcatctccggcaccacagtgatcctgaccggaggcggctccggaggcggtagcggcggtggatctggcggcagcggcggctcccaagccgtggtaacccaggagcccagtctgacagtgagccctggcggtacagtgaccttgacttgcaggagcagtaccggagccgtaactacctcaaactacgccaactgggtgcagcagaagcccggtcaggcccccaggggccttattggtgggactaacaaacgagcacccggaacccccgcaaggttcagcggcagccttctgggcggaaaggccgctctcacattgagcggcgtgcagcccgaggacgaggccgagtactactgcgccctgtggtacagcaacctgtgggtgttcggcggagggaccaagctgaccgtgctgggccagcccaaagctgcgccgagcgtgaccctgttccccccgtcaagcgaggagctgcaggctaacaaggccaccctggtgtgcctgattagtgacttctaccccggtgccgtcaccgtggcctggaaggccgacagtagcccagttaaagcgggcgtcgagaccaccactcccagcaagcagagcaacaacaagtacgccgcgagcagctacctgagtctgacccccgagcagtggaagagccacaggagctacagctgccaggtgacccacgagggcagcactgtggagaagactgtggccccgaccgagtgccccccatgtagcggcggagggtcccaggtgcagcttcaagagagcggacccggcctcgtgaagcccagcgagaccttgagcctgacctgcactgtgagtggcggtagcgtgagcagcggcgactattactggacctggatcaggcagagccctggcaaggggctggagtggatcggccacatctactacagcgggaacacgaactacaaccccagcctgaagagcaggctgacgatcagcatcgacacgagcaagacccagttctcacttaagctcagcagcgtgaccgccgcagacaccgccatatactactgcgtgagggacagggtgacgggcgctttcgacatctggggccaaggcacaatggtcacggtgagctccggtgggggtggcagcgggggaggcggaagcggcggaggtggctctgatatccagatgacccaaagccccagtagcctgtccgccagtgtaggagatagggtaaccatcacttgccaagcgagccaagacatcagcaactacctgaattggtatcagcagaagcccggcaaagcacccaagctcctgatctacgacgccagcaatctggagaccggcgtgcccagcaggttcagcggatctggtagcggcaccgacttcaccttcaccataagtagtctgcagcccgaggacatcgccacctacttctgtcagcacttcgatcacctgcccctggccttcggcggtgggaccaaggtggagatcaag

SEQ ID NO: 150 - DNA, 1449 bp, Artificial Sequence
  source: /note="Description of Artificial Sequence: Synthetic HC polypeptide"
ggcggcagcggcggctccgaggtgcagctggtggagtccggcggcggcctggtgcagcccggcggcagcctgaggctgtcctgcgccgcctctggcttcacctttaacacatacgcaatgaattgggtgcgccaggcaccaggcaagggactggagtgggtggcccggatcagaagcaagtacaacaattatgccacctactatgccgactccgtgaaggatcggtttaccatcagcagagacgattccaagaacacactgtatctgcagatgaatagcctgcgggccgaggatacagccgtgtactattgcgtgagacacggcaactttggcaattcttacgtgagctggttcgcctattggggccagggcaccatggtgacagtgtcctctgcctctaccaagggacctagcgtgttcccactggcacctagctccaagtctaccagcggaggcacagccgccctgggatgtctggtgaaggactactttccagagcccgtgacagtgtcctggaactctggcgccctgaccagcggagtgcacacattccctgccgtgctgcagtctagcggcctgtactccctgtcctctgtggtgaccgtgccaagctcctctctgggcacccagacatatatctgcaacgtgaatcacaagccctctaatacaaaggtggacaagagggtggagcctaagagctgccccccttgtggcggaggcggtagcgatatccagatgacccaaagccccagtagcctgtccgccagtgtaggagatagggtaaccatcacttgccaagcgagccaagacatcagcaactacctgaattggtatcagcagaagcccggcaaagcacccaagctcctgatctacgacgccagcaatctggagaccggcgtgcccagcaggttcagcggatctggtagcggcaccgacttcaccttcaccataagtagtctgcagcccgaggacatcgccacctacttctgtcagcacttcgatcacctgcccctggccttcggcggtgggaccaaggtggagatcaagggtgggggtggcagcgggggaggcggaagcggcggaggtggctctcaggtgcagcttcaagagagcggacccggcctcgtgaagcccagcgagaccttgagcctgacctgcactgtgagtggcggtagcgtgagcagcggcgactattactggacctggatcaggcagagccctggcaaggggctggagtggatcggccacatctactacagcgggaacacgaactacaaccccagcctgaagagcaggctgacgatcagcatcgacacgagcaagacccagttctcacttaagctcagcagcgtgaccgccgcagacaccgccatatactactgcgtgagggacagggtgacgggcgctttcgacatctggggccaaggcacaatggtcacggtgagctcc

SEQ ID NO: 151 - DNA, 1407 bp, Artificial Sequence
  source: /note="Description of Artificial Sequence: Synthetic LC polypeptide"
ggcggcagcggcggctcccaagccgtggtaacccaggagcccagtctgacagtgagccctggcggtacagtgaccttgacttgcaggagcagtaccggagccgtaactacctcaaactacgccaactgggtgcagcagaagcccggtcaggcccccaggggccttattggtgggactaacaaacgagcacccggaacccccgcaaggttcagcggcagccttctgggcggaaaggccgctctcacattgagcggcgtgcagcccgaggacgaggccgagtactactgcgccctgtggtacagcaacctgtgggtgttcggcggagggaccaagctgaccgtgctgggccagcccaaagctgcgccgagcgtgaccctgttccccccgtcaagcgaggagctgcaggctaacaaggccaccctggtgtgcctgattagtgacttctaccccggtgccgtcaccgtggcctggaaggccgacagtagcccagttaaagcgggcgtcgagaccaccactcccagcaagcagagcaacaacaagtacgccgcgagcagctacctgagtctgacccccgagcagtggaagagccacaggagctacagctgccaggtgacccacgagggcagcactgtggagaagactgtggccccgaccgagtgccccccatgtagcggcggagggtccgatatccagatgacccaaagccccagtagcctgtccgccagtgtaggagatagggtaaccatcacttgccaagcgagccaagacatcagcaactacctgaattggtatcagcagaagcccggcaaagcacccaagctcctgatctacgacgccagcaatctggagaccggcgtgcccagcaggttcagcggatctggtagcggcaccgacttcaccttcaccataagtagtctgcagcccgaggacatcgccacctacttctgtcagcacttcgatcacctgcccctggccttcggcggtgggaccaaggtggagatcaagggtgggggtggcagcgggggaggcggaagcggcggaggtggctctcaggtgcagcttcaagagagcggacccggcctcgtgaagcccagcgagaccttgagcctgacctgcactgtgagtggcggtagcgtgagcagcggcgactattactggacctggatcaggcagagccctggcaaggggctggagtggatcggccacatctactacagcgggaacacgaactacaaccccagcctgaagagcaggctgacgatcagcatcgacacgagcaagacccagttctcacttaagctcagcagcgtgaccgccgcagacaccgccatatactactgcgtgagggacagggtgacgggcgctttcgacatctggggccaaggcacaatggtcacggtgagctcc

SEQ ID NO: 152 - DNA, 1449 bp, Artificial Sequence
  source: /note="Description of Artificial Sequence: Synthetic HC polypeptide"
ggcggcagcggcggctccgaggtgcagctggtggagtccggcggcggcctggtgcagcccggcggcagcctgaggctgtcctgcgccgcctctggcttcacctttaacacatacgcaatgaattgggtgcgccaggcaccaggcaagggactggagtgggtggcccggatcagaagcaagtacaacaattatgccacctactatgccgactccgtgaaggatcggtttaccatcagcagagacgattccaagaacacactgtatctgcagatgaatagcctgcgggccgaggatacagccgtgtactattgcgtgagacacggcaactttggcaattcttacgtgagctggttcgcctattggggccagggcaccatggtgacagtgtcctctgcctctaccaagggacctagcgtgttcccactggcacctagctccaagtctaccagcggaggcacagccgccctgggatgtctggtgaaggactactttccagagcccgtgacagtgtcctggaactctggcgccctgaccagcggagtgcacacattccctgccgtgctgcagtctagcggcctgtactccctgtcctctgtggtgaccgtgccaagctcctctctgggcacccagacatatatctgcaacgtgaatcacaagccctctaatacaaaggtggacaagagggtggagcctaagagctgccccccttgtggcggaggcggtagccaggtgcagcttcaagagagcggacccggcctcgtgaagcccagcgagaccttgagcctgacctgcactgtgagtggcggtagcgtgagcagcggcgactattactggacctggatcaggcagagccctggcaaggggctggagtggatcggccacatctactacagcgggaacacgaactacaaccccagcctgaagagcaggctgacgatcagcatcgacacgagcaagacccagttctcacttaagctcagcagcgtgaccgccgcagacaccgccatatactactgcgtgagggacagggtgacgggcgctttcgacatctggggccaaggcacaatggtcacggtgagctccggtgggggtggcagcgggggaggcggaagcggcggaggtggctctgatatccagatgacccaaagccccagtagcctgtccgccagtgtaggagatagggtaaccatcacttgccaagcgagccaagacatcagcaactacctgaattggtatcagcagaagcccggcaaagcacccaagctcctgatctacgacgccagcaatctggagaccggcgtgcccagcaggttcagcggatctggtagcggcaccgacttcaccttcaccataagtagtctgcagcccgaggacatcgccacctacttctgtcagcacttcgatcacctgcccctggccttcggcggtgggaccaaggtggagatcaag

SEQ ID NO: 153 - DNA, 1407 bp, Artificial Sequence
  source: /note="Description of Artificial Sequence: Synthetic LC polypeptide"
ggcggcagcggcggctcccaagccgtggtaacccaggagcccagtctgacagtgagccctggcggtacagtgaccttgacttgcaggagcagtaccggagccgtaactacctcaaactacgccaactgggtgcagcagaagcccggtcaggcccccaggggccttattggtgggactaacaaacgagcacccggaacccccgcaaggttcagcggcagccttctgggcggaaaggccgctctcacattgagcggcgtgcagcccgaggacgaggccgagtactactgcgccctgtggtacagcaacctgtgggtgttcggcggagggaccaagctgaccgtgctgggccagcccaaagctgcgccgagcgtgaccctgttccccccgtcaagcgaggagctgcaggctaacaaggccaccctggtgtgcctgattagtgacttctaccccggtgccgtcaccgtggcctggaaggccgacagtagcccagttaaagcgggcgtcgagaccaccactcccagcaagcagagcaacaacaagtacgccgcgagcagctacctgagtctgacccccgagcagtggaagagccacaggagctacagctgccaggtgacccacgagggcagcactgtggagaagactgtggccccgaccgagtgccccccatgtagcggcggagggtcccaggtgcagcttcaagagagcggacccggcctcgtgaagcccagcgagaccttgagcctgacctgcactgtgagtggcggtagcgtgagcagcggcgactattactggacctggatcaggcagagccctggcaaggggctggagtggatcggccacatctactacagcgggaacacgaactacaaccccagcctgaagagcaggctgacgatcagcatcgacacgagcaagacccagttctcacttaagctcagcagcgtgaccgccgcagacaccgccatatactactgcgtgagggacagggtgacgggcgctttcgacatctggggccaaggcacaatggtcacggtgagctccggtgggggtggcagcgggggaggcggaagcggcggaggtggctctgatatccagatgacccaaagccccagtagcctgtccgccagtgtaggagatagggtaaccatcacttgccaagcgagccaagacatcagcaactacctgaattggtatcagcagaagcccggcaaagcacccaagctcctgatctacgacgccagcaatctggagaccggcgtgcccagcaggttcagcggatctggtagcggcaccgacttcaccttcaccataagtagtctgcagcccgaggacatcgccacctacttctgtcagcacttcgatcacctgcccctggccttcggcggtgggaccaaggtggagatcaag

SEQ ID NO: 154 - DNA, 18 bp, Artificial Sequence
  source: /note="Description of Artificial Sequence: Synthetic linker"
ggcggcagcggcggctcc

SEQ ID NO: 155 - DNA, 669 bp, Artificial Sequence
  source: /note="Description of Artificial Sequence: Synthetic anti-CD3VH-CH1 sequence"
gaggtgcagctggtggagtccggcggcggcctggtgcagcccggcggcagcctgaggctgtcctgcgccgcctctggcttcacctttaacacatacgcaatgaattgggtgcgccaggcaccaggcaagggactggagtgggtggcccggatcagaagcaagtacaacaattatgccacctactatgccgactccgtgaaggatcggtttaccatcagcagagacgattccaagaacacactgtatctgcagatgaatagcctgcgggccgaggatacagccgtgtactattgcgtgagacacggcaactttggcaattcttacgtgagctggttcgcctattggggccagggcaccatggtgacagtgtcctctgcctctaccaagggacctagcgtgttcccactggcacctagctccaagtctaccagcggaggcacagccgccctgggatgtctggtgaaggactactttccagagcccgtgacagtgtcctggaactctggcgccctgaccagcggagtgcacacattccctgccgtgctgcagtctagcggcctgtactccctgtcctctgtggtgaccgtgccaagctcctctctgggcacccagacatatatctgcaacgtgaatcacaagccctctaatacaaaggtggacaagagggtg

SEQ ID NO: 156 - protein, 245 aa, Artificial Sequence
  source: /note="Description of Artificial Sequence: Synthetic anti-ROR1 (VL-VH) sequence"
DIQMTQSPSSLSASVGDRVTINCQASQSIDSNLAWYQQKPGKPPKLLIYRASNLASGVPSRFSGSGSGTDFTLTISSLQPEDVATYYCLGGVGNVSYRTSFGGGTKVEIKGGGGSGGGGSGGGGSGGGGSQSVKESEGDLVTPAGNLTLTCTASGSDINDYPISWVRQAPGKGLEWIGFINSGGSTWYASWVKGRFTISRTSTTVDLKMTSLTTDDTATYFCARGYSTYYGDFNIWGPGTLVTIS

SEQ ID NO: 157 - DNA, 735 bp, Artificial Sequence
  source: /note="Description of Artificial Sequence: Synthetic anti-ROR1 (VL-VH) sequence"
gacatccagatgactcagtcccccagttccctgtccgcctccgtgggcgacagggtgacaatcaactgccaggcctcacagtctatcgacagtaaccttgcctggtatcaacagaagcccgggaagccccccaagctgctgatctacagggcctccaatctggcatccggcgtgccctccaggttctccggttccggctcaggcaccgattttaccctgaccatatcctccttgcagcccgaggacgtggctacctactactgtctgggcggtgtgggcaacgtgtcctacaggacctcctttggtggcggcaccaaggtggagatcaagggcggaggagggtccggtggagggggcagtggtgggggaggatcaggaggtggtggctcccagagtgtgaaggagtccgagggcgacctggtgacccctgctggcaatctgaccctcacctgcaccgcttccggtagcgacatcaacgactaccccatatcatgggtgagacaggctcccggcaagggcctggagtggatcggcttcatcaatagcggtgggtccacatggtacgcaagttgggtgaagggcaggttcaccatctctcgaacctcaactaccgtcgacctgaaaatgacctccctgacaaccgacgacaccgcaacctatttctgcgccaggggctactccacatactatggcgacttcaacatctgggggccagggaccctggtcactatctca

SEQ ID NO: 158 - protein, 6 aa, Artificial Sequence
  source: /note="Description of Artificial Sequence: Synthetic linker"
GGSGGS

SEQ ID NO: 159 - DNA, 639 bp, Artificial Sequence
  source: /note="Description of Artificial Sequence: Synthetic anti CD3 epsilon VL-CL sequence"
caagccgtggtaacccaggagcccagtctgacagtgagccctggcggtacagtgaccttgacttgcaggagcagtaccggagccgtaactacctcaaactacgccaactgggtgcagcagaagcccggtcaggcccccaggggccttattggtgggactaacaaacgagcacccggaacccccgcaaggttcagcggcagccttctgggcggaaaggccgctctcacattgagcggcgtgcagcccgaggacgaggccgagtactactgcgccctgtggtacagcaacctgtgggtgttcggcggagggaccaagctgaccgtgctgggccagcccaaagctgcgccgagcgtgaccctgttccccccgtcaagcgaggagctgcaggctaacaaggccaccctggtgtgcctgattagtgacttctaccccggtgccgtcaccgtggcctggaaggccgacagtagcccagttaaagcgggcgtcgagaccaccactcccagcaagcagagcaacaacaagtacgccgcgagcagctacctgagtctgacccccgagcagtggaagagccacaggagctacagctgccaggtgacccacgagggcagcactgtggagaagactgtggccccgaccgag

SEQ ID NO: 160 - protein, 18 aa, Artificial Sequence
  source: /note="Description of Artificial Sequence: Synthetic linker with cleavable sequence"
GGSGGSPLGLAGGGSGGS

SEQ ID NO: 161 - DNA, 54 bp, Artificial Sequence
  source: /note="Description of Artificial Sequence: Synthetic linker with cleavable sequence"
ggaggctccggcggctctccactgggcctggccggcggcggcagcggcggctcc

SEQ ID NO: 162 - protein, 18 aa, Artificial Sequence
  source: /note="Description of Artificial Sequence: Synthetic linker with non-cleavable sequence"
GGSGGSGGSGGSGGSGGS

SEQ ID NO: 163 - DNA, 54 bp, Artificial Sequence
  source: /note="Description of Artificial Sequence: Synthetic linker with non-cleavable sequence"
ggaggctccggcggctctgggggcagcggaggtagtggcggcagcggcggctcc

SEQ ID NO: 164 - DNA, 81 bp, Artificial Sequence
  source: /note="Description of Artificial Sequence: Synthetic CAP sequence"
caggacggcaacgaggagatgggcggcatcacccagacaccatacaaggtgagcatctccggcaccacagtgatcctgacc

SEQ ID NO: 165 - protein, 6 aa, Artificial Sequence
  source: /note="Description of Artificial Sequence: Synthetic linker"
GGSGGS

SEQ ID NO: 166 - protein, 245 aa, Artificial Sequence
  source: /note="Description of Artificial Sequence: Synthetic anti-ROR1 (VH-VL) sequence"
QSVKESEGDLVTPAGNLTLTCTASGSDINDYPISWVRQAPGKGLEWIGFINSGGSTWYASWVKGRFTISRTSTTVDLKMTSLTTDDTATYFCARGYSTYYGDFNIWGPGTLVTISGGGGSGGGGSGGGGSGGGGSDIQMTQSPSSLSASVGDRVTINCQASQSIDSNLAWYQQKPGKPPKLLIYRASNLASGVPSRFSGSGSGTDFTLTISSLQPEDVATYYCLGGVGNVSYRTSFGGGTKVEIK

SEQ ID NO: 167 - DNA, 735 bp, Artificial Sequence
  source: /note="Description of Artificial Sequence: Synthetic anti-ROR1 (VH-VL) sequence"
cagagtgtgaaggagtccgagggcgacctggtgacccctgctggcaatctgaccctcacctgcaccgcttccggtagcgacatcaacgactaccccatatcatgggtgagacaggctcccggcaagggcctggagtggatcggcttcatcaatagcggtgggtccacatggtacgcaagttgggtgaagggcaggttcaccatctctcgaacctcaactaccgtcgacctgaaaatgacctccctgacaaccgacgacaccgcaacctatttctgcgccaggggctactccacatactatggcgacttcaacatctgggggccagggaccctggtcactatctcaggcggaggagggtccggtggagggggcagtggtgggggaggatcaggaggtggtggctccgacatccagatgactcagtcccccagttccctgtccgcctccgtgggcgacagggtgacaatcaactgccaggcctcacagtctatcgacagtaaccttgcctggtatcaacagaagcccgggaagccccccaagctgctgatctacagggcctccaatctggcatccggcgtgccctccaggttctccggttccggctcaggcaccgattttaccctgaccatatcctccttgcagcccgaggacgtggctacctactactgtctgggcggtgtgggcaacgtgtcctacaggacctcctttggtggcggcaccaaggtggagatcaag

SEQ ID NO: 168 - protein, 244 aa, Artificial Sequence
  source: /note="Description of Artificial Sequence: Synthetic anti-PSMA (VL-VH) sequence"
DVQITQSPSYLAASPGETITINCRASKSISKYLAWYQEKPGKANKLLIHSGSTLQSGIPSRFSGSGSGTDFTLTISSLEPEDFAMYYCQQHIEYPWTFGGGTKLEIKRAGGGGSGGGGSSGGGGSEIQLQQSGPELVKPGASVKMSCKASGYTFTDYYMHWVKQNNGESLEWIGYFNPYNDYTRYNQNFNGKATLTVDKSSSTAYMQLNSLTSEDSAFYYCARSDGYYDAMDYWGQGTSVTVSS

SEQ ID NO: 169 - DNA, 732 bp, Artificial Sequence
  source: /note="Description of Artificial Sequence: Synthetic anti-PSMA (VL-VH) sequence"
gacgtgcagatcacccagtccccctcctatctggccgcttcccccggtgagaccatcaccatcaactgtagggcctccaagtccatctccaaatacctggcctggtatcaggagaagcccggaaaagccaacaaactgctgatccatagcggctctaccctgcagagtggcatcccctccaggttctcaggctccggttctggaaccgactttactcttacaatttcctcactcgaacccgaagacttcgccatgtactactgccagcagcacatcgagtacccctggaccttcggaggaggcactaagctggagatcaagagggctggcggaggtggcagtgggggaggcggttcctccggcggtggcgggagcgagatccagctgcaacagtccggtcccgagctggtgaagcctggagcctccgtgaagatgtcctgtaaggcctctggctacacctttaccgactactacatgcactgggtaaaacagaacaacggcgagtccctggagtggataggctacttcaacccctacaacgactacaccaggtacaaccagaacttcaatggcaaggccaccctgaccgtggacaagagctcctccacagcctatatgcagctcaactccctgacttccgaggactccgccttctactattgcgccaggtccgacgggtactacgacgccatggactactggggccagggcacctcagtgacagtgtcctcc

SEQ ID NO: 170 - protein, 244 aa, Artificial Sequence
  source: /note="Description of Artificial Sequence: Synthetic anti-PSMA (VH-VL) sequence"
EIQLQQSGPELVKPGASVKMSCKASGYTFTDYYMHWVKQNNGESLEWIGYFNPYNDYTRYNQNFNGKATLTVDKSSSTAYMQLNSLTSEDSAFYYCARSDGYYDAMDYWGQGTSVTVSSGGGGSGGGGSSGGGGSDVQITQSPSYLAASPGETITINCRASKSISKYLAWYQEKPGKANKLLIHSGSTLQSGIPSRFSGSGSGTDFTLTISSLEPEDFAMYYCQQHIEYPWTFGGGTKLEIKRA

SEQ ID NO: 171 - DNA, 732 bp, Artificial Sequence
  source: /note="Description of Artificial Sequence: Synthetic anti-PSMA (VH-VL) sequence"
gagatccagctgcaacagtccggtcccgagctggtgaagcctggagcctccgtgaagatgtcctgtaaggcctctggctacacctttaccgactactacatgcactgggtaaaacagaacaacggcgagtccctggagtggataggctacttcaacccctacaacgactacaccaggtacaaccagaacttcaatggcaaggccaccctgaccgtggacaagagctcctccacagcctatatgcagctcaactccctgacttccgaggactccgccttctactattgcgccaggtccgacgggtactacgacgccatggactactggggccagggcacctcagtgacagtgtcctccggcggaggtggcagtgggggaggcggttcctccggcggtggcgggagcgacgtgcagatcacccagtccccctcctatctggccgcttcccccggtgagaccatcaccatcaactgtagggcctccaagtccatctccaaatacctggcctggtatcaggagaagcccggaaaagccaacaaactgctgatccatagcggctctaccctgcagagtggcatcccctccaggttctcaggctccggttctggaaccgactttactcttacaatttcctcactcgaacccgaagacttcgccatgtactactgccagcagcacatcgagtacccctggaccttcggaggaggcactaagctggagatcaagagggct

SEQ ID NO: 172 - protein, 245 aa, Artificial Sequence
  source: /note="Description of Artificial Sequence: Synthetic anti-5T4 (VL-VH) sequence"
DIQMTQSPSSLSASVGDRVTITCRASQGISNYLAWFQQKPGKAPKSLIYRANRLQSGVPSRFSGSGSGTDFTLTISSLQPEDVATYYCLQYDDFPWTFGQGTKLEIKGGGGSGGGGSGGGGSGGGGSQVQLVQSGAEVKKPGASVKVSCKASGYTFTSFWMHWVRQAPGQGLEWMGRIDPNRGGTEYNEKAKSRVTMTADKSTSTAYMELSSLRSEDTAVYYCAGGNPYYPMDYWGQGTTVTVSS

SEQ ID NO: 173 - DNA, 735 bp, Artificial Sequence
  source: /note="Description of Artificial Sequence: Synthetic anti-5T4 (VL-VH) sequence"
gacatacagatgacccagtcccccagctccctctcagcctctgtgggcgacagggtgaccatcacctgcagagcttcccaaggcatctccaactacctggcctggttccagcagaagccaggcaaggctcctaagagcctgatctacagggctaaccgtctgcagtccggcgtgccctccaggttctctgggtccggcagcggcacagacttcacccttaccatctcctccctgcagcccgaggacgtagccacatattactgcctgcagtacgatgacttcccctggactttcggacagggcaccaagctggagataaagggaggtggtggctcagggggtgggggctccggcggaggggggtctggcggtggcgggtcccaggtgcagctggttcagtctggtgctgaggtgaagaagcctggcgcctcagttaaagtgtcatgcaaggcctccggctacaccttcaccagtttctggatgcactgggtgaggcaggcacccggtcagggcctggagtggatgggccgaatcgatcccaaccgtggcggcactgagtacaacgagaaggccaagagcagggtcacaatgaccgccgacaagtccacctcaactgcttatatggagctgtcctccttgcgttctgaggacactgccgtgtactactgtgcaggcggcaacccctactaccccatggactattgggggcagggtaccactgtcaccgtgtcatct

SEQ ID NO: 174 - protein, 245 aa, Artificial Sequence
  source: /note="Description of Artificial Sequence: Synthetic anti-5T4 (VH-VL) sequence"
QVQLVQSGAEVKKPGASVKVSCKASGYTFTSFWMHWVRQAPGQGLEWMGRIDPNRGGTEYNEKAKSRVTMTADKSTSTAYMELSSLRSEDTAVYYCAGGNPYYPMDYWGQGTTVTVSSGGGGSGGGGSGGGGSGGGGSDIQMTQSPSSLSASVGDRVTITCRASQGISNYLAWFQQKPGKAPKSLIYRANRLQSGVPSRFSGSGSGTDFTLTISSLQPEDVATYYCLQYDDFPWTFGQGTKLEIK

SEQ ID NO: 175 - DNA, 735 bp, Artificial Sequence
  source: /note="Description of Artificial Sequence: Synthetic anti-5T4 (VH-VL) sequence"
caggtgcagctggttcagtctggtgctgaggtgaagaagcctggcgcctcagttaaagtgtcatgcaaggcctccggctacaccttcaccagtttctggatgcactgggtgaggcaggcacccggtcagggcctggagtggatgggccgaatcgatcccaaccgtggcggcactgagtacaacgagaaggccaagagcagggtcacaatgaccgccgacaagtccacctcaactgcttatatggagctgtcctccttgcgttctgaggacactgccgtgtactactgtgcaggcggcaacccctactaccccatggactattgggggcagggtaccactgtcaccgtgtcatctggaggtggtggctcagggggtgggggctccggcggaggggggtctggcggtggcgggtccgacatacagatgacccagtcccccagctccctctcagcctctgtgggcgacagggtgaccatcacctgcagagcttcccaaggcatctccaactacctggcctggttccagcagaagccaggcaaggctcctaagagcctgatctacagggctaaccgtctgcagtccggcgtgccctccaggttctctgggtccggcagcggcacagacttcacccttaccatctcctccctgcagcccgaggacgtagccacatattactgcctgcagtacgatgacttcccctggactttcggacagggcaccaagctggagataaag

SEQ ID NO: 176 - protein, 1119 aa, Artificial Sequence
  source: /note="Description of Artificial Sequence: Synthetic HC 5T4 Polypeptide with MMP 2/9 cleavage protease sequence"
QDGNEEMGGITQTPYKVSISGTTVILTGGGGSGGGGSGGGGSEVAHRFKDLGEENFKALVLIAFAQYLQQCPFEDHVKLVNEVTEFAKTCVADESAENCDKSLHTLFGDKLCTVATLRETYGEMADCCAKQEPERNECFLQHKDDNPNLPRLVRPEVDVMCTAFHDNEETFLKKYLYEIARRHPYFYAPELLFFAKRYKAAFTECCQAADKAACLLPKLDELRDEGKASSAKQRLKCASLQKFGERAFKAWAVARLSQRFPKAEFAEVSKLVTDLTKVHTECCHGDLLECADDRADLAKYICENQDSISSKLKECCEKPLLEKSHCIAEVENDEMPADLPSLAADFVESKDVCKNYAEAKDVFLGMFLYEYARRHPDYSVVLLLRLAKTYETTLEKCCAAADPHECYAKVFDEFKPLVEEPQNLIKQNCELFEQLGEYKFQNALLVRYTKKVPQVSTPTLVEVSRNLGKVGSKCCKHPEAKRMPCAEDYLSVVLNQLCVLHEKTPVSDRVTKCCTESLVNRRPCFSALEVDETYVPKEFNAETFTFHADICTLSEKERQIKKQTALVELVKHKPKATKEQLKAVMDDFAAFVEKCCKADDKETCFAEEGKKLVAASQAAGGSGGSPLGLAGGGSGGSEVQLVESGGGLVQPGGSLRLSCAASGFTFNTYAMNWVRQAPGKGLEWVARIRSKYNNYATYYADSVKDRFTISRDDSKNTLYLQMNSLRAEDTAVYYCVRHGNFGNSYVSWFAYWGQGTMVTVSSASTKGPSVFPLAPSSKSTSGGTAALGCLVKDYFPEPVTVSWNSGALTSGVHTFPAVLQSSGLYSLSSVVTVPSSSLGTQTYICNVNHKPSNTKVDKRVEPKSCPPCGGGGSDDIQMTQSPSSLSASVGDRVTITCRASQGISNYLAWFQQKPGKAPKSLIYRANRLQSGVPSRFSGSGSGTDFTLTISSLQPEDVATYYCLQYDDFPWTFGQGTKLEIKGGGGSGGGGSGGGGSGGGGSQVQLVQSGAEVKKPGASVKVSCKASGYTFTSFWMHWVRQAPGQGLEWMGRIDPNRGGTEYNEKAKSRVTMTADKSTSTAYMELSSLRSEDTAVYYCAGGNPYYPMDYWGQGTTVTVSS

SEQ ID NO: 177 - protein, 473 aa, Artificial Sequence
  source: /note="Description of Artificial Sequence: Synthetic LC 5T4 Polypeptide"
GGSGGSQAVVTQEPSLTVSPGGTVTLTCRSSTGAVTTSNYANWVQQKPGQAPRGLIGGTNKRAPGTPARFSGSLLGGKAALTLSGVQPEDEAEYYCALWYSNLWVFGGGTKLTVLGQPKAAPSVTLFPPSSEELQANKATLVCLISDFYPGAVTVAWKADSSPVKAGVETTTPSKQSNNKYAASSYLSLTPEQWKSHRSYSCQVTHEGSTVEKTVAPTECPPCSGGGSDIQMTQSPSSLSASVGDRVTITCRASQGISNYLAWFQQKPGKAPKSLIYRANRLQSGVPSRFSGSGSGTDFTLTISSLQPEDVATYYCLQYDDFPWTFGQGTKLEIKGGGGSGGGGSGGGGSGGGGSQVQLVQSGAEVKKPGASVKVSCKASGYTFTSFWMHWVRQAPGQGLEWMGRIDPNRGGTEYNEKAKSRVTMTADKSTSTAYMELSSLRSEDTAVYYCAGGNPYYPMDYWGQGTTVTVSS

SEQ ID NO: 178 - protein, 493 aa, Artificial Sequence
  source: /note="Description of Artificial Sequence: Synthetic h1F3.5Fd- KYK-2.0_ScFv(L-H) sequence"
GGSGGSEVQLVESGGGLVQPGGSLRLSCAASGFTFNTYAMNWVRQAPGKGLEWVARIRSKYNNYATYYADSVKDRFTISRDDSKNTLYLQMNSLRAEDTAVYYCVRHGNFGNSYVSWFAYWGQGTMVTVSSASTKGPSVFPLAPSSKSTSGGTAALGCLVKDYFPEPVTVSWNSGALTSGVHTFPAVLQSSGLYSLSSVVTVPSSSLGTQTYICNVNHKPSNTKVDKRVEPKSCPPCGGGGSQSALTQPASVSGSPGQSITISCSGSSSNIGNNAVNWYQQLPGKAPKLLIYYDDLLPSGVSDRFSGSKSGTSAFLAISGLQSEDEADYYCAAWDDSLNGPVFGGGTKLTVLGGGGSGGGGSGGGGSGGGGSQVQLVESGGGLVKPGGSLRLSCAASGFTFSSYGMHWVRQAPGKGLEWVAFIRYDGSNKYYADSVKGRFTISRDNSKNTLYLQMNSLRAEDTAVYYCAKDRGLGDGTYFDYWGQGTTVTVSS

SEQ ID NO: 179 - protein, 493 aa, Artificial Sequence
  source: /note="Description of Artificial Sequence: Synthetic h1F3.5Fd- KYK-2.0_ScFv(H-L) sequence"
GGSGGSEVQLVESGGGLVQPGGSLRLSCAASGFTFNTYAMNWVRQAPGKGLEWVARIRSKYNNYATYYADSVKDRFTISRDDSKNTLYLQMNSLRAEDTAVYYCVRHGNFGNSYVSWFAYWGQGTMVTVSSASTKGPSVFPLAPSSKSTSGGTAALGCLVKDYFPEPVTVSWNSGALTSGVHTFPAVLQSSGLYSLSSVVTVPSSSLGTQTYICNVNHKPSNTKVDKRVEPKSCPPCGGGGSQVQLVESGGGLVKPGGSLRLSCAASGFTFSSYGMHWVRQAPGKGLEWVAFIRYDGSNKYYADSVKGRFTISRDNSKNTLYLQMNSLRAEDTAVYYCAKDRGLGDGTYFDYWGQGTTVTVSSGGGGSGGGGSGGGGSGGGGSQSALTQPASVSGSPGQSITISCSGSSSNIGNNAVNWYQQLPGKAPKLLIYYDDLLPSGVSDRFSGSKSGTSAFLAISGLQSEDEADYYCAAWDDSLNGPVFGGGTKLTVL

SEQ ID NO: 180 - protein, 494 aa, Artificial Sequence
  source: /note="Description of Artificial Sequence: Synthetic h1F3.5Fd- NKG2A_ScFv(L-H) sequence"
GGSGGSEVQLVESGGGLVQPGGSLRLSCAASGFTFNTYAMNWVRQAPGKGLEWVARIRSKYNNYATYYADSVKDRFTISRDDSKNTLYLQMNSLRAEDTAVYYCVRHGNFGNSYVSWFAYWGQGTMVTVSSASTKGPSVFPLAPSSKSTSGGTAALGCLVKDYFPEPVTVSWNSGALTSGVHTFPAVLQSSGLYSLSSVVTVPSSSLGTQTYICNVNHKPSNTKVDKRVEPKSCPPCGGGGSDIQMTQSPSSLSASVGDRVTITCRASENIYSYLAWYQQKPGKAPKLLIYNAKTLAEGVPSRFSGSGSGTDFTLTISSLQPEDFATYYCQHHYGTPRTFGGGTKVEIKGGGGSGGGGSGGGGSGGGGSQVQLVQSGAEVKKPGASVKVSCKASGYTFTSYWMNWVRQAPGQGLEWMGRIDPYDSETHYAQKLQGRVTMTTDTSTSTAYMELRSLRSDDTAVYYCARGGYDFDVGTLYWFFDVWGQGTTVTVSS

SEQ ID NO: 181 - protein, 494 aa, Artificial Sequence
  source: /note="Description of Artificial Sequence: Synthetic h1F3.5Fd- NKG2A_ScFv(H-L) sequence"
GGSGGSEVQLVESGGGLVQPGGSLRLSCAASGFTFNTYAMNWVRQAPGKGLEWVARIRSKYNNYATYYADSVKDRFTISRDDSKNTLYLQMNSLRAEDTAVYYCVRHGNFGNSYVSWFAYWGQGTMVTVSSASTKGPSVFPLAPSSKSTSGGTAALGCLVKDYFPEPVTVSWNSGALTSGVHTFPAVLQSSGLYSLSSVVTVPSSSLGTQTYICNVNHKPSNTKVDKRVEPKSCPPCGGGGSQVQLVQSGAEVKKPGASVKVSCKASGYTFTSYWMNWVRQAPGQGLEWMGRIDPYDSETHYAQKLQGRVTMTTDTSTSTAYMELRSLRSDDTAVYYCARGGYDFDVGTLYWFFDVWGQGTTVTVSSGGGGSGGGGSGGGGSGGGGSDIQMTQSPSSLSASVGDRVTITCRASENIYSYLAWYQQKPGKAPKLLIYNAKTLAEGVPSRFSGSGSGTDFTLTISSLQPEDFATYYCQHHYGTPRTFGGGTKVEIK

SEQ ID NO: 182 - protein, 493 aa, Artificial Sequence
  source: /note="Description of Artificial Sequence: Synthetic h1F3.5Fd- KYK-2.0 mut_ScFv(L-H) sequence"
GGSGGSEVQLVESGGGLVQPGGSLRLSCAASGFTFNTYAMNWVRQAPGKGLEWVARIRSKYNNYATYYADSVKDRFTISRDDSKNTLYLQMNSLRAEDTAVYYCVRHGNFGNSYVSWFAYWGQGTMVTVSSASTKGPSVFPLAPSSKSTSGGTAALGCLVKDYFPEPVTVSWNSGALTSGVHTFPAVLQSSGLYSLSSVVTVPSSSLGTQTYICNVNHKPSNTKVDKRVEPKSCPPCGGGGSQSALTQPASVSGSPGQSITISCSGSSSNIGNNAVNWYQQLPGKAPKLLIYADDLLPSGVSDRFSGSKSGTSAFLAISGLQSEDEADYYCAAWDDSLNGPVFGGGTKLTVLGGGGSGGGGSGGGGSGGGGSQVQLVESGGGLVKPGGSLRLSCAASGFTFSSYGMHWVRQAPGKGLEWVAFIRYDGSNKYYADSVKGRFTISRDNSKNTLYLQMNSLRAEDTAVYYCAKDAGEGDGTYFDYWGQGTTVTVSS

SEQ ID NO: 183 - protein, 493 aa, Artificial Sequence
  source: /note="Description of Artificial Sequence: Synthetic h1F3.5Fd- KYK-2.0 mut_ScFv(H-L) sequence"
GGSGGSEVQLVESGGGLVQPGGSLRLSCAASGFTFNTYAMNWVRQAPGKGLEWVARIRSKYNNYATYYADSVKDRFTISRDDSKNTLYLQMNSLRAEDTAVYYCVRHGNFGNSYVSWFAYWGQGTMVTVSSASTKGPSVFPLAPSSKSTSGGTAALGCLVKDYFPEPVTVSWNSGALTSGVHTFPAVLQSSGLYSLSSVVTVPSSSLGTQTYICNVNHKPSNTKVDKRVEPKSCPPCGGGGSQVQLVESGGGLVKPGGSLRLSCAASGFTFSSYGMHWVRQAPGKGLEWVAFIRYDGSNKYYADSVKGRFTISRDNSKNTLYLQMNSLRAEDTAVYYCAKDAGEGDGTYFDYWGQGTTVTVSSGGGGSGGGGSGGGGSGGGGSQSALTQPASVSGSPGQSITISCSGSSSNIGNNAVNWYQQLPGKAPKLLIYADDLLPSGVSDRFSGSKSGTSAFLAISGLQSEDEADYYCAAWDDSLNGPVFGGGTKLTVL

SEQ ID NO: 184 - protein, 494 aa, Artificial Sequence
  source: /note="Description of Artificial Sequence: Synthetic h1F3.5Fd- NKG2A mut_ScFv(L-H) sequence"
GGSGGSEVQLVESGGGLVQPGGSLRLSCAASGFTFNTYAMNWVRQAPGKGLEWVARIRSKYNNYATYYADSVKDRFTISRDDSKNTLYLQMNSLRAEDTAVYYCVRHGNFGNSYVSWFAYWGQGTMVTVSSASTKGPSVFPLAPSSKSTSGGTAALGCLVKDYFPEPVTVSWNSGALTSGVHTFPAVLQSSGLYSLSSVVTVPSSSLGTQTYICNVNHKPSNTKVDKRVEPKSCPPCGGGGSDIQMTQSPSSLSASVGDRVTITCRASENIYSALAWYQQKPGKAPKLLIYNAKTLAEGVPSRFSGSGSGTDFTLTISSLQPEDFATYYCQHHAGTPRTFGGGTKVEIKGGGGSGGGGSGGGGSGGGGSQVQLVQSGAEVKKPGASVKVSCKASGYTFTSYWMNWVRQAPGQGLEWMGRIDPYDSETHYAQKLQGRVTMTTDTSTSTAYMELRSLRSDDTAVYYCARGGYDFDVDTLYWFFDVWGQGTTVTVSS

SEQ ID NO: 185 - protein, 494 aa, Artificial Sequence
  source: /note="Description of Artificial Sequence: Synthetic h1F3.5Fd- NKG2A mut_ScFv(H-L) sequence"
GGSGGSEVQLVESGGGLVQPGGSLRLSCAASGFTFNTYAMNWVRQAPGKGLEWVARIRSKYNNYATYYADSVKDRFTISRDDSKNTLYLQMNSLRAEDTAVYYCVRHGNFGNSYVSWFAYWGQGTMVTVSSASTKGPSVFPLAPSSKSTSGGTAALGCLVKDYFPEPVTVSWNSGALTSGVHTFPAVLQSSGLYSLSSVVTVPSSSLGTQTYICNVNHKPSNTKVDKRVEPKSCPPCGGGGSQVQLVQSGAEVKKPGASVKVSCKASGYTFTSYWMNWVRQAPGQGLEWMGRIDPYDSETHYAQKLQGRVTMTTDTSTSTAYMELRSLRSDDTAVYYCARGGYDFDVDTLYWFFDVWGQGTTVTVSSGGGGSGGGGSGGGGSGGGGSDIQMTQSPSSLSASVGDRVTITCRASENIYSALAWYQQKPGKAPKLLIYNAKTLAEGVPSRFSGSGSGTDFTLTISSLQPEDFATYYCQHHAGTPRTFGGGTKVEIK

SEQ ID NO: 186 - protein, 494 aa, Artificial Sequence
  source: /note="Description of Artificial Sequence: Synthetic h1F3.5FdMut3- NKG2A_ScFv(L-H) sequence"
GGSGGSEVQLVESGGGLVQPGGSLRLSCAASGFTFNTYAMNWVRQAPGKGLEWVARIGSGGNGYATYYADSVKDRFTISRDDSKNTLYLQMNSLRAEDTAVYYCVRHGNFGASARSWFAYWGQGTMVTVSSASTKGPSVFPLAPSSKSTSGGTAALGCLVKDYFPEPVTVSWNSGALTSGVHTFPAVLQSSGLYSLSSVVTVPSSSLGTQTYICNVNHKPSNTKVDKRVEPKSCPPCGGGGSDIQMTQSPSSLSASVGDRVTITCRASENIYSYLAWYQQKPGKAPKLLIYNAKTLAEGVPSRFSGSGSGTDFTLTISSLQPEDFATYYCQHHYGTPRTFGGGTKVEIKGGGGSGGGGSGGGGSGGGGSQVQLVQSGAEVKKPGASVKVSCKASGYTFTSYWMNWVRQAPGQGLEWMGRIDPYDSETHYAQKLQGRVTMTTDTSTSTAYMELRSLRSDDTAVYYCARGGYDFDVGTLYWFFDVWGQGTTVTVSS

SEQ ID NO: 187 - protein, 493 aa, Artificial Sequence
  source: /note="Description of Artificial Sequence: Synthetic h1F3.5FdMut3- KYK2.0_ScFv(L-H) sequence"
GGSGGSEVQLVESGGGLVQPGGSLRLSCAASGFTFNTYAMNWVRQAPGKGLEWVARIGSGGNGYATYYADSVKDRFTISRDDSKNTLYLQMNSLRAEDTAVYYCVRHGNFGASARSWFAYWGQGTMVTVSSASTKGPSVFPLAPSSKSTSGGTAALGCLVKDYFPEPVTVSWNSGALTSGVHTFPAVLQSSGLYSLSSVVTVPSSSLGTQTYICNVNHKPSNTKVDKRVEPKSCPPCGGGGSQSALTQPASVSGSPGQSITISCSGSSSNIGNNAVNWYQQLPGKAPKLLIYYDDLLPSGVSDRFSGSKSGTSAFLAISGLQSEDEADYYCAAWDDSLNGPVFGGGTKLTVLGGGGSGGGGSGGGGSGGGGSQVQLVESGGGLVKPGGSLRLSCAASGFTFSSYGMHWVRQAPGKGLEWVAFIRYDGSNKYYADSVKGRFTISRDNSKNTLYLQMNSLRAEDTAVYYCAKDRGLGDGTYFDYWGQGTTVTVSS

SEQ ID NO: 188 - protein, 494 aa, Artificial Sequence
  source: /note="Description of Artificial Sequence: Synthetic h1F3.5FdMut4- NKG2A_ScFv(L-H) sequence"
GGSGGSEVQLVESGGGLVQPGGSLRLSCAASGFTFNGGSGGWVRQAPGKGLEWVAGGGSGGGGSGGGSGGSGGGRFTISRDDSKNTLYLQMNSLRAEDTAVYYCVRGGGSGGSGGSGGGGWGQGTMVTVSSASTKGPSVFPLAPSSKSTSGGTAALGCLVKDYFPEPVTVSWNSGALTSGVHTFPAVLQSSGLYSLSSVVTVPSSSLGTQTYICNVNHKPSNTKVDKRVEPKSCPPCGGGGSDIQMTQSPSSLSASVGDRVTITCRASENIYSYLAWYQQKPGKAPKLLIYNAKTLAEGVPSRFSGSGSGTDFTLTISSLQPEDFATYYCQHHYGTPRTFGGGTKVEIKGGGGSGGGGSGGGGSGGGGSQVQLVQSGAEVKKPGASVKVSCKASGYTFTSYWMNWVRQAPGQGLEWMGRIDPYDSETHYAQKLQGRVTMTTDTSTSTAYMELRSLRSDDTAVYYCARGGYDFDVGTLYWFFDVWGQGTTVTVSS

SEQ ID NO: 189 - protein, 493 aa, Artificial Sequence
  source: /note="Description of Artificial Sequence: Synthetic h1F3.5FdMut4- KYK2.0_ScFv(L-H) sequence"
GGSGGSEVQLVESGGGLVQPGGSLRLSCAASGFTFNGGSGGWVRQAPGKGLEWVAGGGSGGGGSGGGSGGSGGGRFTISRDDSKNTLYLQMNSLRAEDTAVYYCVRGGGSGGSGGSGGGGWGQGTMVTVSSASTKGPSVFPLAPSSKSTSGGTAALGCLVKDYFPEPVTVSWNSGALTSGVHTFPAVLQSSGLYSLSSVVTVPSSSLGTQTYICNVNHKPSNTKVDKRVEPKSCPPCGGGGSQSALTQPASVSGSPGQSITISCSGSSSNIGNNAVNWYQQLPGKAPKLLIYYDDLLPSGVSDRFSGSKSGTSAFLAISGLQSEDEADYYCAAWDDSLNGPVFGGGTKLTVLGGGGSGGGGSGGGGSGGGGSQVQLVESGGGLVKPGGSLRLSCAASGFTFSSYGMHWVRQAPGKGLEWVAFIRYDGSNKYYADSVKGRFTISRDNSKNTLYLQMNSLRAEDTAVYYCAKDRGLGDGTYFDYWGQGTTVTVSS

SEQ ID NO: 190 - protein, 542 aa, Artificial Sequence
  source: /note="Description of Artificial Sequence: Synthetic h1F3.5Fd- KYK-2.0_ScFv(L-H)_MC2_Dcap1 sequence"
GGSGGSEVQLVESGGGLVQPGGSLRLSCAASGFTFNTYAMNWVRQAPGKGLEWVARIRSKYNNYATYYADSVKDRFTISRDDSKNTLYLQMNSLRAEDTAVYYCVRHGNFGNSYVSWFAYWGQGTMVTVSSASTKGPSVFPLAPSSKSTSGGTAALGCLVKDYFPEPVTVSWNSGALTSGVHTFPAVLQSSGLYSLSSVVTVPSSSLGTQTYICNVNHKPSNTKVDKRVEPKSCPPCGGGGSQSALTQPASVSGSPGQSITISCSGSSSNIGNNAVNWYQQLPGKAPKLLIYYDDLLPSGVSDRFSGSKSGTSAFLAISGLQSEDEADYYCAAWDDSLNGPVFGGGTKLTVLGGGGSGGGGSGGGGSGGGGSQVQLVESGGGLVKPGGSLRLSCAASGFTFSSYGMHWVRQAPGKGLEWVAFIRYDGSNKYYADSVKGRFTISRDNSKNTLYLQMNSLRAEDTAVYYCAKDRGLGDGTYFDYWGQGTTVTVSSGGSGGSPLGLAGLSGRSDNHGGSGGSNCYQFFDESKNWYESQASCMSQN

SEQ ID NO: 191 - protein, 537 aa, Artificial Sequence
  source: /note="Description of Artificial Sequence: Synthetic h1F3.5Fd- KYK-2.0_ScFv(L-H)_MC2_Dcap2 sequence"
GGSGGSEVQLVESGGGLVQPGGSLRLSCAASGFTFNTYAMNWVRQAPGKGLEWVARIRSKYNNYATYYADSVKDRFTISRDDSKNTLYLQMNSLRAEDTAVYYCVRHGNFGNSYVSWFAYWGQGTMVTVSSASTKGPSVFPLAPSSKSTSGGTAALGCLVKDYFPEPVTVSWNSGALTSGVHTFPAVLQSSGLYSLSSVVTVPSSSLGTQTYICNVNHKPSNTKVDKRVEPKSCPPCGGGGSQSALTQPASVSGSPGQSITISCSGSSSNIGNNAVNWYQQLPGKAPKLLIYYDDLLPSGVSDRFSGSKSGTSAFLAISGLQSEDEADYYCAAWDDSLNGPVFGGGTKLTVLGGGGSGGGGSGGGGSGGGGSQVQLVESGGGLVKPGGSLRLSCAASGFTFSSYGMHWVRQAPGKGLEWVAFIRYDGSNKYYADSVKGRFTISRDNSKNTLYLQMNSLRAEDTAVYYCAKDRGLGDGTYFDYWGQGTTVTVSSGGSGGSPLGLAGLSGRSDNHGGSGGSLLKVYSKEDQDLLKLVKS

SEQ ID NO: 192 - protein, 555 aa, Artificial Sequence
  source: /note="Description of Artificial Sequence: Synthetic h1F3.5Fd- KYK-2.0_ScFv(L-H)_MC2_Dcap3 sequence"
GGSGGSEVQLVESGGGLVQPGGSLRLSCAASGFTFNTYAMNWVRQAPGKGLEWVARIRSKYNNYATYYADSVKDRFTISRDDSKNTLYLQMNSLRAEDTAVYYCVRHGNFGNSYVSWFAYWGQGTMVTVSSASTKGPSVFPLAPSSKSTSGGTAALGCLVKDYFPEPVTVSWNSGALTSGVHTFPAVLQSSGLYSLSSVVTVPSSSLGTQTYICNVNHKPSNTKVDKRVEPKSCPPCGGGGSQSALTQPASVSGSPGQSITISCSGSSSNIGNNAVNWYQQLPGKAPKLLIYYDDLLPSGVSDRFSGSKSGTSAFLAISGLQSEDEADYYCAAWDDSLNGPVFGGGTKLTVLGGGGSGGGGSGGGGSGGGGSQVQLVESGGGLVKPGGSLRLSCAASGFTFSSYGMHWVRQAPGKGLEWVAFIRYDGSNKYYADSVKGRFTISRDNSKNTLYLQMNSLRAEDTAVYYCAKDRGLGDGTYFDYWGQGTTVTVSSGGSGGSPLGLAGLSGRSDNHGGSGGSNNCYQFFDESKNWYESQASCMSQNSTPNTYICMQRT

SEQ ID NO: 193 - protein, 568 aa, Artificial Sequence
  source: /note="Description of Artificial Sequence: Synthetic h1F3.5Fd- KYK-2.0_ScFv(L-H)_MC2_Dcap4 sequence"
GGSGGSEVQLVESGGGLVQPGGSLRLSCAASGFTFNTYAMNWVRQAPGKGLEWVARIRSKYNNYATYYADSVKDRFTISRDDSKNTLYLQMNSLRAEDTAVYYCVRHGNFGNSYVSWFAYWGQGTMVTVSSASTKGPSVFPLAPSSKSTSGGTAALGCLVKDYFPEPVTVSWNSGALTSGVHTFPAVLQSSGLYSLSSVVTVPSSSLGTQTYICNVNHKPSNTKVDKRVEPKSCPPCGGGGSQSALTQPASVSGSPGQSITISCSGSSSNIGNNAVNWYQQLPGKAPKLLIYYDDLLPSGVSDRFSGSKSGTSAFLAISGLQSEDEADYYCAAWDDSLNGPVFGGGTKLTVLGGGGSGGGGSGGGGSGGGGSQVQLVESGGGLVKPGGSLRLSCAASGFTFSSYGMHWVRQAPGKGLEWVAFIRYDGSNKYYADSVKGRFTISRDNSKNTLYLQMNSLRAEDTAVYYCAKDRGLGDGTYFDYWGQGTTVTVSSGGSGGSPLGLAGLSGRSDNHGGSGGSKNWICYKNNCYQFFDESKNWYESQASCMSQNASLENCSTPNTYICMQRT

SEQ ID NO: 194 - protein, 549 aa, Artificial Sequence
  source: /note="Description of Artificial Sequence: Synthetic h1F3.5Fd- KYK-2.0_ScFv(L-H)_MC3_Dcap1 sequence"
GGSGGSEVQLVESGGGLVQPGGSLRLSCAASGFTFNTYAMNWVRQAPGKGLEWVARIRSKYNNYATYYADSVKDRFTISRDDSKNTLYLQMNSLRAEDTAVYYCVRHGNFGNSYVSWFAYWGQGTMVTVSSASTKGPSVFPLAPSSKSTSGGTAALGCLVKDYFPEPVTVSWNSGALTSGVHTFPAVLQSSGLYSLSSVVTVPSSSLGTQTYICNVNHKPSNTKVDKRVEPKSCPPCGGGGSQSALTQPASVSGSPGQSITISCSGSSSNIGNNAVNWYQQLPGKAPKLLIYYDDLLPSGVSDRFSGSKSGTSAFLAISGLQSEDEADYYCAAWDDSLNGPVFGGGTKLTVLGGGGSGGGGSGGGGSGGGGSQVQLVESGGGLVKPGGSLRLSCAASGFTFSSYGMHWVRQAPGKGLEWVAFIRYDGSNKYYADSVKGRFTISRDNSKNTLYLQMNSLRAEDTAVYYCAKDRGLGDGTYFDYWGQGTTVTVSSGGSGGSPLGLAGGSGRKGSLSGRSDNHGGSGGSNCYQFFDESKNWYESQASCMSQN

SEQ ID NO: 195 - protein, 544 aa, Artificial Sequence
  source: /note="Description of Artificial Sequence: Synthetic h1F3.5Fd- KYK-2.0_ScFv(L-H)_MC3_Dcap2 sequence"
GGSGGSEVQLVESGGGLVQPGGSLRLSCAASGFTFNTYAMNWVRQAPGKGLEWVARIRSKYNNYATYYADSVKDRFTISRDDSKNTLYLQMNSLRAEDTAVYYCVRHGNFGNSYVSWFAYWGQGTMVTVSSASTKGPSVFPLAPSSKSTSGGTAALGCLVKDYFPEPVTVSWNSGALTSGVHTFPAVLQSSGLYSLSSVVTVPSSSLGTQTYICNVNHKPSNTKVDKRVEPKSCPPCGGGGSQSALTQPASVSGSPGQSITISCSGSSSNIGNNAVNWYQQLPGKAPKLLIYYDDLLPSGVSDRFSGSKSGTSAFLAISGLQSEDEADYYCAAWDDSLNGPVFGGGTKLTVLGGGGSGGGGSGGGGSGGGGSQVQLVESGGGLVKPGGSLRLSCAASGFTFSSYGMHWVRQAPGKGLEWVAFIRYDGSNKYYADSVKGRFTISRDNSKNTLYLQMNSLRAEDTAVYYCAKDRGLGDGTYFDYWGQGTTVTVSSGGSGGSPLGLAGGSGRKGSLSGRSDNHGGSGGSLLKVYSKEDQDLLKLVKS

SEQ ID NO: 196 - protein, 562 aa, Artificial Sequence
  source: /note="Description of Artificial Sequence: Synthetic h1F3.5Fd- KYK-2.0_ScFv(L-H)_MC3_Dcap3 sequence"
GGSGGSEVQLVESGGGLVQPGGSLRLSCAASGFTFNTYAMNWVRQAPGKGLEWVARIRSKYNNYATYYADSVKDRFTISRDDSKNTLYLQMNSLRAEDTAVYYCVRHGNFGNSYVSWFAYWGQGTMVTVSSASTKGPSVFPLAPSSKSTSGGTAALGCLVKDYFPEPVTVSWNSGALTSGVHTFPAVLQSSGLYSLSSVVTVPSSSLGTQTYICNVNHKPSNTKVDKRVEPKSCPPCGGGGSQSALTQPASVSGSPGQSITISCSGSSSNIGNNAVNWYQQLPGKAPKLLIYYDDLLPSGVSDRFSGSKSGTSAFLAISGLQSEDEADYYCAAWDDSLNGPVFGGGTKLTVLGGGGSGGGGSGGGGSGGGGSQVQLVESGGGLVKPGGSLRLSCAASGFTFSSYGMHWVRQAPGKGLEWVAFIRYDGSNKYYADSVKGRFTISRDNSKNTLYLQMNSLRAEDTAVYYCAKDRGLGDGTYFDYWGQGTTVTVSSGGSGGSPLGLAGGSGRKGSLSGRSDNHGGSGGSNNCYQFFDESKNWYESQASCMSQNSTPNTYICMQRT

SEQ ID NO: 197 - protein, 575 aa, Artificial Sequence
  source: /note="Description of Artificial Sequence: Synthetic h1F3.5Fd- KYK-2.0_ScFv(L-H)_MC3_Dcap4 sequence"
GGSGGSEVQLVESGGGLVQPGGSLRLSCAASGFTFNTYAMNWVRQAPGKGLEWVARIRSKYNNYATYYADSVKDRFTISRDDSKNTLYLQMNSLRAEDTAVYYCVRHGNFGNSYVSWFAYWGQGTMVTVSSASTKGPSVFPLAPSSKSTSGGTAALGCLVKDYFPEPVTVSWNSGALTSGVHTFPAVLQSSGLYSLSSVVTVPSSSLGTQTYICNVNHKPSNTKVDKRVEPKSCPPCGGGGSQSALTQPASVSGSPGQSITISCSGSSSNIGNNAVNWYQQLPGKAPKLLIYYDDLLPSGVSDRFSGSKSGTSAFLAISGLQSEDEADYYCAAWDDSLNGPVFGGGTKLTVLGGGGSGGGGSGGGGSGGGGSQVQLVESGGGLVKPGGSLRLSCAASGFTFSSYGMHWVRQAPGKGLEWVAFIRYDGSNKYYADSVKGRFTISRDNSKNTLYLQMNSLRAEDTAVYYCAKDRGLGDGTYFDYWGQGTTVTVSSGGSGGSPLGLAGGSGRKGSLSGRSDNHGGSGGSKNWICYKNNCYQFFDESKNWYESQASCMSQNASLENCSTPNTYICMQRT

SEQ ID NO: 198 - protein, 541 aa, Artificial Sequence
  source: /note="Description of Artificial Sequence: Synthetic h1F3.5Fd- NKG2A_ScFv(L-H)_MC2_Acap1 sequence"
GGSGGSEVQLVESGGGLVQPGGSLRLSCAASGFTFNTYAMNWVRQAPGKGLEWVARIRSKYNNYATYYADSVKDRFTISRDDSKNTLYLQMNSLRAEDTAVYYCVRHGNFGNSYVSWFAYWGQGTMVTVSSASTKGPSVFPLAPSSKSTSGGTAALGCLVKDYFPEPVTVSWNSGALTSGVHTFPAVLQSSGLYSLSSVVTVPSSSLGTQTYICNVNHKPSNTKVDKRVEPKSCPPCGGGGSDIQMTQSPSSLSASVGDRVTITCRASENIYSYLAWYQQKPGKAPKLLIYNAKTLAEGVPSRFSGSGSGTDFTLTISSLQPEDFATYYCQHHYGTPRTFGGGTKVEIKGGGGSGGGGSGGGGSGGGGSQVQLVQSGAEVKKPGASVKVSCKASGYTFTSYWMNWVRQAPGQGLEWMGRIDPYDSETHYAQKLQGRVTMTTDTSTSTAYMELRSLRSDDTAVYYCARGGYDFDVGTLYWFFDVWGQGTTVTVSSGGSGGSPLGLAGLSGRSDNHGGSGGSLSIDNEEEMKFLSIISPSSWI

SEQ ID NO: 199 - protein, 540 aa, Artificial Sequence
  source: /note="Description of Artificial Sequence: Synthetic h1F3.5Fd- NKG2A_ScFv(L-H)_MC2_Acap2 sequence"
GGSGGSEVQLVESGGGLVQPGGSLRLSCAASGFTFNTYAMNWVRQAPGKGLEWVARIRSKYNNYATYYADSVKDRFTISRDDSKNTLYLQMNSLRAEDTAVYYCVRHGNFGNSYVSWFAYWGQGTMVTVSSASTKGPSVFPLAPSSKSTSGGTAALGCLVKDYFPEPVTVSWNSGALTSGVHTFPAVLQSSGLYSLSSVVTVPSSSLGTQTYICNVNHKPSNTKVDKRVEPKSCPPCGGGGSDIQMTQSPSSLSASVGDRVTITCRASENIYSYLAWYQQKPGKAPKLLIYNAKTLAEGVPSRFSGSGSGTDFTLTISSLQPEDFATYYCQHHYGTPRTFGGGTKVEIKGGGGSGGGGSGGGGSGGGGSQVQLVQSGAEVKKPGASVKVSCKASGYTFTSYWMNWVRQAPGQGLEWMGRIDPYDSETHYAQKLQGRVTMTTDTSTSTAYMELRSLRSDDTAVYYCARGGYDFDVGTLYWFFDVWGQGTTVTVSSGGSGGSPLGLAGLSGRSDNHGGSGGSNAELNCAVLQVNRLKSAQCG

SEQ ID NO: 200 - protein, 560 aa, Artificial Sequence
  source: /note="Description of Artificial Sequence: Synthetic h1F3.5Fd- NKG2A_ScFv(L-H)_MC2_Acap3 sequence"
GGSGGSEVQLVESGGGLVQPGGSLRLSCAASGFTFNTYAMNWVRQAPGKGLEWVARIRSKYNNYATYYADSVKDRFTISRDDSKNTLYLQMNSLRAEDTAVYYCVRHGNFGNSYVSWFAYWGQGTMVTVSSASTKGPSVFPLAPSSKSTSGGTAALGCLVKDYFPEPVTVSWNSGALTSGVHTFPAVLQSSGLYSLSSVVTVPSSSLGTQTYICNVNHKPSNTKVDKRVEPKSCPPCGGGGSDIQMTQSPSSLSASVGDRVTITCRASENIYSYLAWYQQKPGKAPKLLIYNAKTLAEGVPSRFSGSGSGTDFTLTISSLQPEDFATYYCQHHYGTPRTFGGGTKVEIKGGGGSGGGGSGGGGSGGGGSQVQLVQSGAEVKKPGASVKVSCKASGYTFTSYWMNWVRQAPGQGLEWMGRIDPYDSETHYAQKLQGRVTMTTDTSTSTAYMELRSLRSDDTAVYYCARGGYDFDVGTLYWFFDVWGQGTTVTVSSGGSGGSPLGLAGLSGRSDNHGGSGGSLSIDNEEEMKFLSIISPSSWIGVFNCAVLQVNRLKSAQCG

SEQ ID NO: 201 - protein, 550 aa, Artificial Sequence
  source: /note="Description of Artificial Sequence: Synthetic h1F3.5Fd- NKG2A_ScFv(L-H)_MC2_Acap4 sequence"
GGSGGSEVQLVESGGGLVQPGGSLRLSCAASGFTFNTYAMNWVRQAPGKGLEWVARIRSKYNNYATYYADSVKDRFTISRDDSKNTLYLQMNSLRAEDTAVYYCVRHGNFGNSYVSWFAYWGQGTMVTVSSASTKGPSVFPLAPSSKSTSGGTAALGCLVKDYFPEPVTVSWNSGALTSGVHTFPAVLQSSGLYSLSSVVTVPSSSLGTQTYICNVNHKPSNTKVDKRVEPKSCPPCGGGGSDIQMTQSPSSLSASVGDRVTITCRASENIYSYLAWYQQKPGKAPKLLIYNAKTLAEGVPSRFSGSGSGTDFTLTISSLQPEDFATYYCQHHYGTPRTFGGGTKVEIKGGGGSGGGGSGGGGSGGGGSQVQLVQSGAEVKKPGASVKVSCKASGYTFTSYWMNWVRQAPGQGLEWMGRIDPYDSETHYAQKLQGRVTMTTDTSTSTAYMELRSLRSDDTAVYYCARGGYDFDVGTLYWFFDVWGQGTTVTVSSGGSGGSPLGLAGLSGRSDNHGGSGGSAFKHEIKDSDNAELNCAVLQVNRLKSAQCG

SEQ ID NO: 202 - protein, 548 aa, Artificial Sequence
  source: /note="Description of Artificial Sequence: Synthetic h1F3.5Fd- NKG2A_ScFv(L-H)_MC3_Acap1 sequence"
GGSGGSEVQLVESGGGLVQPGGSLRLSCAASGFTFNTYAMNWVRQAPGKGLEWVARIRSKYNNYATYYADSVKDRFTISRDDSKNTLYLQMNSLRAEDTAVYYCVRHGNFGNSYVSWFAYWGQGTMVTVSSASTKGPSVFPLAPSSKSTSGGTAALGCLVKDYFPEPVTVSWNSGALTSGVHTFPAVLQSSGLYSLSSVVTVPSSSLGTQTYICNVNHKPSNTKVDKRVEPKSCPPCGGGGSDIQMTQSPSSLSASVGDRVTITCRASENIYSYLAWYQQKPGKAPKLLIYNAKTLAEGVPSRFSGSGSGTDFTLTISSLQPEDFATYYCQHHYGTPRTFGGGTKVEIKGGGGSGGGGSGGGGSGGGGSQVQLVQSGAEVKKPGASVKVSCKASGYTFTSYWMNWVRQAPGQGLEWMGRIDPYDSETHYAQKLQGRVTMTTDTSTSTAYMELRSLRSDDTAVYYCARGGYDFDVGTLYWFFDVWGQGTTVTVSSGGSGGSPLGLAGGSGRKGSLSGRSDNHGGSGGSLSIDNEEEMKFLSIISPSSWI

SEQ ID NO: 203 - protein, 547 aa, Artificial Sequence
  source: /note="Description of Artificial Sequence: Synthetic h1F3.5Fd- NKG2A_ScFv(L-H)_MC3_Acap2 sequence"
GGSGGSEVQLVESGGGLVQPGGSLRLSCAASGFTFNTYAMNWVRQAPGKGLEWVARIRSKYNNYATYYADSVKDRFTISRDDSKNTLYLQMNSLRAEDTAVYYCVRHGNFGNSYVSWFAYWGQGTMVTVSSASTKGPSVFPLAPSSKSTSGGTAALGCLVKDYFPEPVTVSWNSGALTSGVHTFPAVLQSSGLYSLSSVVTVPSSSLGTQTYICNVNHKPSNTKVDKRVEPKSCPPCGGGGSDIQMTQSPSSLSASVGDRVTITCRASENIYSYLAWYQQKPGKAPKLLIYNAKTLAEGVPSRFSGSGSGTDFTLTISSLQPEDFATYYCQHHYGTPRTFGGGTKVEIKGGGGSGGGGSGGGGSGGGGSQVQLVQSGAEVKKPGASVKVSCKASGYTFTSYWMNWVRQAPGQGLEWMGRIDPYDSETHYAQKLQGRVTMTTDTSTSTAYMELRSLRSDDTAVYYCARGGYDFDVGTLYWFFDVWGQGTTVTVSSGGSGGSPLGLAGGSGRKGSLSGRSDNHGGSGGSNAELNCAVLQVNRLKSAQCG

SEQ ID NO: 204 - protein, 567 aa, Artificial Sequence
  source: /note="Description of Artificial Sequence: Synthetic h1F3.5Fd- NKG2A_ScFv(L-H)_MC3_Acap3 sequence"
GGSGGSEVQLVESGGGLVQPGGSLRLSCAASGFTFNTYAMNWVRQAPGKGLEWVARIRSKYNNYATYYADSVKDRFTISRDDSKNTLYLQMNSLRAEDTAVYYCVRHGNFGNSYVSWFAYWGQGTMVTVSSASTKGPSVFPLAPSSKSTSGGTAALGCLVKDYFPEPVTVSWNSGALTSGVHTFPAVLQSSGLYSLSSVVTVPSSSLGTQTYICNVNHKPSNTKVDKRVEPKSCPPCGGGGSDIQMTQSPSSLSASVGDRVTITCRASENIYSYLAWYQQKPGKAPKLLIYNAKTLAEGVPSRFSGSGSGTDFTLTISSLQPEDFATYYCQHHYGTPRTFGGGTKVEIKGGGGSGGGGSGGGGSGGGGSQVQLVQSGAEVKKPGASVKVSCKASGYTFTSYWMNWVRQAPGQGLEWMGRIDPYDSETHYAQKLQGRVTMTTDTSTSTAYMELRSLRSDDTAVYYCARGGYDFDVGTLYWFFDVWGQGTTVTVSSGGSGGSPLGLAGGSGRKGSLSGRSDNHGGSGGSLSIDNEEEMKFLSIISPSSWIGVFNCAVLQVNRLKSAQCG

SEQ ID NO: 205 - protein, 557 aa, Artificial Sequence
  source: /note="Description of Artificial Sequence: Synthetic h1F3.5Fd- NKG2A_ScFv(L-H)_MC3_Acap4 sequence"
GGSGGSEVQLVESGGGLVQPGGSLRLSCAASGFTFNTYAMNWVRQAPGKGLEWVARIRSKYNNYATYYADSVKDRFTISRDDSKNTLYLQMNSLRAEDTAVYYCVRHGNFGNSYVSWFAYWGQGTMVTVSSASTKGPSVFPLAPSSKSTSGGTAALGCLVKDYFPEPVTVSWNSGALTSGVHTFPAVLQSSGLYSLSSVVTVPSSSLGTQTYICNVNHKPSNTKVDKRVEPKSCPPCGGGGSDIQMTQSPSSLSASVGDRVTITCRASENIYSYLAWYQQKPGKAPKLLIYNAKTLAEGVPSRFSGSGSGTDFTLTISSLQPEDFATYYCQHHYGTPRTFGGGTKVEIKGGGGSGGGGSGGGGSGGGGSQVQLVQSGAEVKKPGASVKVSCKASGYTFTSYWMNWVRQAPGQGLEWMGRIDPYDSETHYAQKLQGRVTMTTDTSTSTAYMELRSLRSDDTAVYYCARGGYDFDVGTLYWFFDVWGQGTTVTVSSGGSGGSPLGLAGGSGRKGSLSGRSDNHGGSGGSAFKHEIKDSDNAELNCAVLQVNRLKSAQCG

SEQ ID NO: 206 - protein, 1130 aa, Artificial Sequence
  source: /note="Description of Artificial Sequence: Synthetic CD3cap137-ALB-MC2-hF3.5Fd-NKG2A sequence"
QDGNEEMGGITQTPYKVSISGTTVILTGGGSGGGSGGGSEVAHRFKDLGEENFKALVLIAFAQYLQQCPFEDHVKLVNEVTEFAKTCVADESAENCDKSLHTLFGDKLCTVATLRETYGEMADCCAKQEPERNECFLQHKDDNPNLPRLVRPEVDVMCTAFHDNEETFLKKYLYEIARRHPYFYAPELLFFAKRYKAAFTECCQAADKAACLLPKLDELRDEGKASSAKQRLKCASLQKFGERAFKAWAVARLSQRFPKAEFAEVSKLVTDLTKVHTECCHGDLLECADDRADLAKYICENQDSISSKLKECCEKPLLEKSHCIAEVENDEMPADLPSLAADFVESKDVCKNYAEAKDVFLGMFLYEYARRHPDYSVVLLLRLAKTYETTLEKCCAAADPHECYAKVFDEFKPLVEEPQNLIKQNCELFEQLGEYKFQNALLVRYTKKVPQVSTPTLVEVSRNLGKVGSKCCKHPEAKRMPCAEDYLSVVLNQLCVLHEKTPVSDRVTKCCTESLVNRRPCFSALEVDETYVPKEFNAETFTFHADICTLSEKERQIKKQTALVELVKHKPKATKEQLKAVMDDFAAFVEKCCKADDKETCFAEEGKKLVAASQAAGGSGGSPLGLAGLSGRSDNHGGSGGSEVQLVESGGGLVQPGGSLRLSCAASGFTFNTYAMNWVRQAPGKGLEWVARIRSKYNNYATYYADSVKDRFTISRDDSKNTLYLQMNSLRAEDTAVYYCVRHGNFGNSYVSWFAYWGQGTMVTVSSASTKGPSVFPLAPSSKSTSGGTAALGCLVKDYFPEPVTVSWNSGALTSGVHTFPAVLQSSGLYSLSSVVTVPSSSLGTQTYICNVNHKPSNTKVDKRVEPKSCPPCGGGGSDIQMTQSPSSLSASVGDRVTITCRASENIYSYLAWYQQKPGKAPKLLIYNAKTLAEGVPSRFSGSGSGTDFTLTISSLQPEDFATYYCQHHYGTPRTFGGGTKVEIKGGGGSGGGGSGGGGSGGGGSQVQLVQSGAEVKKPGASVKVSCKASGYTFTSYWMNWVRQAPGQGLEWMGRIDPYDSETHYAQKLQGRVTMTTDTSTSTAYMELRSLRSDDTAVYYCARGGYDFDVGTLYWFFDVWGQGTTVTVSS

SEQ ID NO: 207 - protein, 1130 aa, Artificial Sequence
  source: /note="Description of Artificial Sequence: Synthetic CD3cap116-ALB-MC2-hF3.5Fd-NKG2A sequence"
QDGQEEMGGITQTPYKVSISGTTVILTGGGSGGGSGGGSEVAHRFKDLGEENFKALVLIAFAQYLQQCPFEDHVKLVNEVTEFAKTCVADESAENCDKSLHTLFGDKLCTVATLRETYGEMADCCAKQEPERNECFLQHKDDNPNLPRLVRPEVDVMCTAFHDNEETFLKKYLYEIARRHPYFYAPELLFFAKRYKAAFTECCQAADKAACLLPKLDELRDEGKASSAKQRLKCASLQKFGERAFKAWAVARLSQRFPKAEFAEVSKLVTDLTKVHTECCHGDLLECADDRADLAKYICENQDSISSKLKECCEKPLLEKSHCIAEVENDEMPADLPSLAADFVESKDVCKNYAEAKDVFLGMFLYEYARRHPDYSVVLLLRLAKTYETTLEKCCAAADPHECYAKVFDEFKPLVEEPQNLIKQNCELFEQLGEYKFQNALLVRYTKKVPQVSTPTLVEVSRNLGKVGSKCCKHPEAKRMPCAEDYLSVVLNQLCVLHEKTPVSDRVTKCCTESLVNRRPCFSALEVDETYVPKEFNAETFTFHADICTLSEKERQIKKQTALVELVKHKPKATKEQLKAVMDDFAAFVEKCCKADDKETCFAEEGKKLVAASQAAGGSGGSPLGLAGLSGRSDNHGGSGGSEVQLVESGGGLVQPGGSLRLSCAASGFTFNTYAMNWVRQAPGKGLEWVARIRSKYNNYATYYADSVKDRFTISRDDSKNTLYLQMNSLRAEDTAVYYCVRHGNFGNSYVSWFAYWGQGTMVTVSSASTKGPSVFPLAPSSKSTSGGTAALGCLVKDYFPEPVTVSWNSGALTSGVHTFPAVLQSSGLYSLSSVVTVPSSSLGTQTYICNVNHKPSNTKVDKRVEPKSCPPCGGGGSDIQMTQSPSSLSASVGDRVTITCRASENIYSYLAWYQQKPGKAPKLLIYNAKTLAEGVPSRFSGSGSGTDFTLTISSLQPEDFATYYCQHHYGTPRTFGGGTKVEIKGGGGSGGGGSGGGGSGGGGSQVQLVQSGAEVKKPGASVKVSCKASGYTFTSYWMNWVRQAPGQGLEWMGRIDPYDSETHYAQKLQGRVTMTTDTSTSTAYMELRSLRSDDTAVYYCARGGYDFDVGTLYWFFDVWGQGTTVTVSS

SEQ ID NO: 208 - protein, 1132 aa, Artificial Sequence
  source: /note="Description of Artificial Sequence: Synthetic CD3cap118-ALB-MC2-hF3.5Fd-NKG2A sequence"
TGLDGQEELGGITQTPYKVSISGTTVILTGGGSGGGSGGGSEVAHRFKDLGEENFKALVLIAFAQYLQQCPFEDHVKLVNEVTEFAKTCVADESAENCDKSLHTLFGDKLCTVATLRETYGEMADCCAKQEPERNECFLQHKDDNPNLPRLVRPEVDVMCTAFHDNEETFLKKYLYEIARRHPYFYAPELLFFAKRYKAAFTECCQAADKAACLLPKLDELRDEGKASSAKQRLKCASLQKFGERAFKAWAVARLSQRFPKAEFAEVSKLVTDLTKVHTECCHGDLLECADDRADLAKYICENQDSISSKLKECCEKPLLEKSHCIAEVENDEMPADLPSLAADFVESKDVCKNYAEAKDVFLGMFLYEYARRHPDYSVVLLLRLAKTYETTLEKCCAAADPHECYAKVFDEFKPLVEEPQNLIKQNCELFEQLGEYKFQNALLVRYTKKVPQVSTPTLVEVSRNLGKVGSKCCKHPEAKRMPCAEDYLSVVLNQLCVLHEKTPVSDRVTKCCTESLVNRRPCFSALEVDETYVPKEFNAETFTFHADICTLSEKERQIKKQTALVELVKHKPKATKEQLKAVMDDFAAFVEKCCKADDKETCFAEEGKKLVAASQAAGGSGGSPLGLAGLSGRSDNHGGSGGSEVQLVESGGGLVQPGGSLRLSCAASGFTFNTYAMNWVRQAPGKGLEWVARIRSKYNNYATYYADSVKDRFTISRDDSKNTLYLQMNSLRAEDTAVYYCVRHGNFGNSYVSWFAYWGQGTMVTVSSASTKGPSVFPLAPSSKSTSGGTAALGCLVKDYFPEPVTVSWNSGALTSGVHTFPAVLQSSGLYSLSSVVTVPSSSLGTQTYICNVNHKPSNTKVDKRVEPKSCPPCGGGGSDIQMTQSPSSLSASVGDRVTITCRASENIYSYLAWYQQKPGKAPKLLIYNAKTLAEGVPSRFSGSGSGTDFTLTISSLQPEDFATYYCQHHYGTPRTFGGGTKVEIKGGGGSGGGGSGGGGSGGGGSQVQLVQSGAEVKKPGASVKVSCKASGYTFTSYWMNWVRQAPGQGLEWMGRIDPYDSETHYAQKLQGRVTMTTDTSTSTAYMELRSLRSDDTAVYYCARGGYDFDVGTLYWFFDVWGQGTTVTVSS

SEQ ID NO: 209 - protein, 1130 aa, Artificial Sequence
  source: /note="Description of Artificial Sequence: Synthetic CD3cap105-ALB-MC2-hF3.5Fd-NKG2A sequence"
QDGTEKMGGITQTPYKVSISGTTVILTGGGSGGGSGGGSEVAHRFKDLGEENFKALVLIAFAQYLQQCPFEDHVKLVNEVTEFAKTCVADESAENCDKSLHTLFGDKLCTVATLRETYGEMADCCAKQEPERNECFLQHKDDNPNLPRLVRPEVDVMCTAFHDNEETFLKKYLYEIARRHPYFYAPELLFFAKRYKAAFTECCQAADKAACLLPKLDELRDEGKASSAKQRLKCASLQKFGERAFKAWAVARLSQRFPKAEFAEVSKLVTDLTKVHTECCHGDLLECADDRADLAKYICENQDSISSKLKECCEKPLLEKSHCIAEVENDEMPADLPSLAADFVESKDVCKNYAEAKDVFLGMFLYEYARRHPDYSVVLLLRLAKTYETTLEKCCAAADPHECYAKVFDEFKPLVEEPQNLIKQNCELFEQLGEYKFQNALLVRYTKKVPQVSTPTLVEVSRNLGKVGSKCCKHPEAKRMPCAEDYLSVVLNQLCVLHEKTPVSDRVTKCCTESLVNRRPCFSALEVDETYVPKEFNAETFTFHADICTLSEKERQIKKQTALVELVKHKPKATKEQLKAVMDDFAAFVEKCCKADDKETCFAEEGKKLVAASQAAGGSGGSPLGLAGLSGRSDNHGGSGGSEVQLVESGGGLVQPGGSLRLSCAASGFTFNTYAMNWVRQAPGKGLEWVARIRSKYNNYATYYADSVKDRFTISRDDSKNTLYLQMNSLRAEDTAVYYCVRHGNFGNSYVSWFAYWGQGTMVTVSSASTKGPSVFPLAPSSKSTSGGTAALGCLVKDYFPEPVTVSWNSGALTSGVHTFPAVLQSSGLYSLSSVVTVPSSSLGTQTYICNVNHKPSNTKVDKRVEPKSCPPCGGGGSDIQMTQSPSSLSASVGDRVTITCRASENIYSYLAWYQQKPGKAPKLLIYNAKTLAEGVPSRFSGSGSGTDFTLTISSLQPEDFATYYCQHHYGTPRTFGGGTKVEIKGGGGSGGGGSGGGGSGGGGSQVQLVQSGAEVKKPGASVKVSCKASGYTFTSYWMNWVRQAPGQGLEWMGRIDPYDSETHYAQKLQGRVTMTTDTSTSTAYMELRSLRSDDTAVYYCARGGYDFDVGTLYWFFDVWGQGTTVTVSS

SEQ ID NO: 210 - protein, 1137 aa, Artificial Sequence
  source: /note="Description of Artificial Sequence: Synthetic CD3cap137-ALB-MC3-hF3.5Fd-NKG2A sequence"
QDGNEEMGGITQTPYKVSISGTTVILTGGGSGGGSGGGSEVAHRFKDLGEENFKALVLIAFAQYLQQCPFEDHVKLVNEVTEFAKTCVADESAENCDKSLHTLFGDKLCTVATLRETYGEMADCCAKQEPERNECFLQHKDDNPNLPRLVRPEVDVMCTAFHDNEETFLKKYLYEIARRHPYFYAPELLFFAKRYKAAFTECCQAADKAACLLPKLDELRDEGKASSAKQRLKCASLQKFGERAFKAWAVARLSQRFPKAEFAEVSKLVTDLTKVHTECCHGDLLECADDRADLAKYICENQDSISSKLKECCEKPLLEKSHCIAEVENDEMPADLPSLAADFVESKDVCKNYAEAKDVFLGMFLYEYARRHPDYSVVLLLRLAKTYETTLEKCCAAADPHECYAKVFDEFKPLVEEPQNLIKQNCELFEQLGEYKFQNALLVRYTKKVPQVSTPTLVEVSRNLGKVGSKCCKHPEAKRMPCAEDYLSVVLNQLCVLHEKTPVSDRVTKCCTESLVNRRPCFSALEVDETYVPKEFNAETFTFHADICTLSEKERQIKKQTALVELVKHKPKATKEQLKAVMDDFAAFVEKCCKADDKETCFAEEGKKLVAASQAAGGSGGSPLGLAGGSGRKGSLSGRSDNHGGSGGSEVQLVESGGGLVQPGGSLRLSCAASGFTFNTYAMNWVRQAPGKGLEWVARIRSKYNNYATYYADSVKDRFTISRDDSKNTLYLQMNSLRAEDTAVYYCVRHGNFGNSYVSWFAYWGQGTMVTVSSASTKGPSVFPLAPSSKSTSGGTAALGCLVKDYFPEPVTVSWNSGALTSGVHTFPAVLQSSGLYSLSSVVTVPSSSLGTQTYICNVNHKPSNTKVDKRVEPKSCPPCGGGGSDIQMTQSPSSLSASVGDRVTITCRASENIYSYLAWYQQKPGKAPKLLIYNAKTLAEGVPSRFSGSGSGTDFTLTISSLQPEDFATYYCQHHYGTPRTFGGGTKVEIKGGGGSGGGGSGGGGSGGGGSQVQLVQSGAEVKKPGASVKVSCKASGYTFTSYWMNWVRQAPGQGLEWMGRIDPYDSETHYAQKLQGRVTMTTDTSTSTAYMELRSLRSDDTAVYYCARGGYDFDVGTLYWFFDVWGQGTTVTVSS

SEQ ID NO: 211 - protein, 1137 aa, Artificial Sequence
  source: /note="Description of Artificial Sequence: Synthetic CD3cap116-ALB-MC3-hF3.5Fd-NKG2A sequence"
QDGQEEMGGITQTPYKVSISGTTVILTGGGSGGGSGGGSEVAHRFKDLGEENFKALVLIAFAQYLQQCPFEDHVKLVNEVTEFAKTCVADESAENCDKSLHTLFGDKLCTVATLRETYGEMADCCAKQEPERNECFLQHKDDNPNLPRLVRPEVDVMCTAFHDNEETFLKKYLYEIARRHPYFYAPELLFFAKRYKAAFTECCQAADKAACLLPKLDELRDEGKASSAKQRLKCASLQKFGERAFKAWAVARLSQRFPKAEFAEVSKLVTDLTKVHTECCHGDLLECADDRADLAKYICENQDSISSKLKECCEKPLLEKSHCIAEVENDEMPADLPSLAADFVESKDVCKNYAEAKDVFLGMFLYEYARRHPDYSVVLLLRLAKTYETTLEKCCAAADPHECYAKVFDEFKPLVEEPQNLIKQNCELFEQLGEYKFQNALLVRYTKKVPQVSTPTLVEVSRNLGKVGSKCCKHPEAKRMPCAEDYLSVVLNQLCVLHEKTPVSDRVTKCCTESLVNRRPCFSALEVDETYVPKEFNAETFTFHADICTLSEKERQIKKQTALVELVKHKPKATKEQLKAVMDDFAAFVEKCCKADDKETCFAEEGKKLVAASQAAGGSGGSPLGLAGGSGRKGSLSGRSDNHGGSGGSEVQLVESGGGLVQPGGSLRLSCAASGFTFNTYAMNWVRQAPGKGLEWVARIRSKYNNYATYYADSVKDRFTISRDDSKNTLYLQMNSLRAEDTAVYYCVRHGNFGNSYVSWFAYWGQGTMVTVSSASTKGPSVFPLAPSSKSTSGGTAALGCLVKDYFPEPVTVSWNSGALTSGVHTFPAVLQSSGLYSLSSVVTVPSSSLGTQTYICNVNHKPSNTKVDKRVEPKSCPPCGGGGSDIQMTQSPSSLSASVGDRVTITCRASENIYSYLAWYQQKPGKAPKLLIYNAKTLAEGVPSRFSGSGSGTDFTLTISSLQPEDFATYYCQHHYGTPRTFGGGTKVEIKGGGGSGGGGSGGGGSGGGGSQVQLVQSGAEVKKPGASVKVSCKASGYTFTSYWMNWVRQAPGQGLEWMGRIDPYDSETHYAQKLQGRVTMTTDTSTSTAYMELRSLRSDDTAVYYCARGGYDFDVGTLYWFFDVWGQGTTVTVSS

SEQ ID NO: 212 - protein, 1139 aa, Artificial Sequence
  source: /note="Description of Artificial Sequence: Synthetic CD3cap118-ALB-MC3-hF3.5Fd-NKG2A sequence"
TGLDGQEELGGITQTPYKVSISGTTVILTGGGSGGGSGGGSEVAHRFKDLGEENFKALVLIAFAQYLQQCPFEDHVKLVNEVTEFAKTCVADESAENCDKSLHTLFGDKLCTVATLRETYGEMADCCAKQEPERNECFLQHKDDNPNLPRLVRPEVDVMCTAFHDNEETFLKKYLYEIARRHPYFYAPELLFFAKRYKAAFTECCQAADKAACLLPKLDELRDEGKASSAKQRLKCASLQKFGERAFKAWAVARLSQRFPKAEFAEVSKLVTDLTKVHTECCHGDLLECADDRADLAKYICENQDSISSKLKECCEKPLLEKSHCIAEVENDEMPADLPSLAADFVESKDVCKNYAEAKDVFLGMFLYEYARRHPDYSVVLLLRLAKTYETTLEKCCAAADPHECYAKVFDEFKPLVEEPQNLIKQNCELFEQLGEYKFQNALLVRYTKKVPQVSTPTLVEVSRNLGKVGSKCCKHPEAKRMPCAEDYLSVVLNQLCVLHEKTPVSDRVTKCCTESLVNRRPCFSALEVDETYVPKEFNAETFTFHADICTLSEKERQIKKQTALVELVKHKPKATKEQLKAVMDDFAAFVEKCCKADDKETCFAEEGKKLVAASQAAGGSGGSPLGLAGGSGRKGSLSGRSDNHGGSGGSEVQLVESGGGLVQPGGSLRLSCAASGFTFNTYAMNWVRQAPGKGLEWVARIRSKYNNYATYYADSVKDRFTISRDDSKNTLYLQMNSLRAEDTAVYYCVRHGNFGNSYVSWFAYWGQGTMVTVSSASTKGPSVFPLAPSSKSTSGGTAALGCLVKDYFPEPVTVSWNSGALTSGVHTFPAVLQSSGLYSLSSVVTVPSSSLGTQTYICNVNHKPSNTKVDKRVEPKSCPPCGGGGSDIQMTQSPSSLSASVGDRVTITCRASENIYSYLAWYQQKPGKAPKLLIYNAKTLAEGVPSRFSGSGSGTDFTLTISSLQPEDFATYYCQHHYGTPRTFGGGTKVEIKGGGGSGGGGSGGGGSGGGGSQVQLVQSGAEVKKPGASVKVSCKASGYTFTSYWMNWVRQAPGQGLEWMGRIDPYDSETHYAQKLQGRVTMTTDTSTSTAYMELRSLRSDDTAVYYCARGGYDFDVGTLYWFFDVWGQGTTVTVSS

SEQ ID NO: 213 - protein, 1137 aa, Artificial Sequence
  source: /note="Description of Artificial Sequence: Synthetic CD3cap105-ALB-MC3-hF3.5Fd-NKG2A sequence"
QDGTEKMGGITQTPYKVSISGTTVILTGGGSGGGSGGGSEVAHRFKDLGEENFKALVLIAFAQYLQQCPFEDHVKLVNEVTEFAKTCVADESAENCDKSLHTLFGDKLCTVATLRETYGEMADCCAKQEPERNECFLQHKDDNPNLPRLVRPEVDVMCTAFHDNEETFLKKYLYEIARRHPYFYAPELLFFAKRYKAAFTECCQAADKAACLLPKLDELRDEGKASSAKQRLKCASLQKFGERAFKAWAVARLSQRFPKAEFAEVSKLVTDLTKVHTECCHGDLLECADDRADLAKYICENQDSISSKLKECCEKPLLEKSHCIAEVENDEMPADLPSLAADFVESKDVCKNYAEAKDVFLGMFLYEYARRHPDYSVVLLLRLAKTYETTLEKCCAAADPHECYAKVFDEFKPLVEEPQNLIKQNCELFEQLGEYKFQNALLVRYTKKVPQVSTPTLVEVSRNLGKVGSKCCKHPEAKRMPCAEDYLSVVLNQLCVLHEKTPVSDRVTKCCTESLVNRRPCFSALEVDETYVPKEFNAETFTFHADICTLSEKERQIKKQTALVELVKHKPKATKEQLKAVMDDFAAFVEKCCKADDKETCFAEEGKKLVAASQAAGGSGGSPLGLAGGSGRKGSLSGRSDNHGGSGGSEVQLVESGGGLVQPGGSLRLSCAASGFTFNTYAMNWVRQAPGKGLEWVARIRSKYNNYATYYADSVKDRFTISRDDSKNTLYLQMNSLRAEDTAVYYCVRHGNFGNSYVSWFAYWGQGTMVTVSSASTKGPSVFPLAPSSKSTSGGTAALGCLVKDYFPEPVTVSWNSGALTSGVHTFPAVLQSSGLYSLSSVVTVPSSSLGTQTYICNVNHKPSNTKVDKRVEPKSCPPCGGGGSDIQMTQSPSSLSASVGDRVTITCRASENIYSYLAWYQQKPGKAPKLLIYNAKTLAEGVPSRFSGSGSGTDFTLTISSLQPEDFATYYCQHHYGTPRTFGGGTKVEIKGGGGSGGGGSGGGGSGGGGSQVQLVQSGAEVKKPGASVKVSCKASGYTFTSYWMNWVRQAPGQGLEWMGRIDPYDSETHYAQKLQGRVTMTTDTSTSTAYMELRSLRSDDTAVYYCARGGYDFDVGTLYWFFDVWGQGTTVTVSS

SEQ ID NO: 214 - protein, 1131 aa, Artificial Sequence
  source: /note="Description of Artificial Sequence: Synthetic CD3cap137-ALB-NC-hF3.5Fd-NKG2A sequence"
QDGNEEMGGITQTPYKVSISGTTVILTGGGSGGGSGGGSEVAHRFKDLGEENFKALVLIAFAQYLQQCPFEDHVKLVNEVTEFAKTCVADESAENCDKSLHTLFGDKLCTVATLRETYGEMADCCAKQEPERNECFLQHKDDNPNLPRLVRPEVDVMCTAFHDNEETFLKKYLYEIARRHPYFYAPELLFFAKRYKAAFTECCQAADKAACLLPKLDELRDEGKASSAKQRLKCASLQKFGERAFKAWAVARLSQRFPKAEFAEVSKLVTDLTKVHTECCHGDLLECADDRADLAKYICENQDSISSKLKECCEKPLLEKSHCIAEVENDEMPADLPSLAADFVESKDVCKNYAEAKDVFLGMFLYEYARRHPDYSVVLLLRLAKTYETTLEKCCAAADPHECYAKVFDEFKPLVEEPQNLIKQNCELFEQLGEYKFQNALLVRYTKKVPQVSTPTLVEVSRNLGKVGSKCCKHPEAKRMPCAEDYLSVVLNQLCVLHEKTPVSDRVTKCCTESLVNRRPCFSALEVDETYVPKEFNAETFTFHADICTLSEKERQIKKQTALVELVKHKPKATKEQLKAVMDDFAAFVEKCCKADDKETCFAEEGKKLVAASQAAGGSGGSGGSGGSGGSGGSGGSGGSGGSEVQLVESGGGLVQPGGSLRLSCAASGFTFNTYAMNWVRQAPGKGLEWVARIRSKYNNYATYYADSVKDRFTISRDDSKNTLYLQMNSLRAEDTAVYYCVRHGNFGNSYVSWFAYWGQGTMVTVSSASTKGPSVFPLAPSSKSTSGGTAALGCLVKDYFPEPVTVSWNSGALTSGVHTFPAVLQSSGLYSLSSVVTVPSSSLGTQTYICNVNHKPSNTKVDKRVEPKSCPPCGGGGSDIQMTQSPSSLSASVGDRVTITCRASENIYSYLAWYQQKPGKAPKLLIYNAKTLAEGVPSRFSGSGSGTDFTLTISSLQPEDFATYYCQHHYGTPRTFGGGTKVEIKGGGGSGGGGSGGGGSGGGGSQVQLVQSGAEVKKPGASVKVSCKASGYTFTSYWMNWVRQAPGQGLEWMGRIDPYDSETHYAQKLQGRVTMTTDTSTSTAYMELRSLRSDDTAVYYCARGGYDFDVGTLYWFFDVWGQGTTVTVSS

SEQ ID NO: 215 - protein, 1131 aa, Artificial Sequence
  source: /note="Description of Artificial Sequence: Synthetic CD3cap116-ALB-NC-hF3.5Fd-NKG2A sequence"
QDGQEEMGGITQTPYKVSISGTTVILTGGGSGGGSGGGSEVAHRFKDLGEENFKALVLIAFAQYLQQCPFEDHVKLVNEVTEFAKTCVADESAENCDKSLHTLFGDKLCTVATLRETYGEMADCCAKQEPERNECFLQHKDDNPNLPRLVRPEVDVMCTAFHDNEETFLKKYLYEIARRHPYFYAPELLFFAKRYKAAFTECCQAADKAACLLPKLDELRDEGKASSAKQRLKCASLQKFGERAFKAWAVARLSQRFPKAEFAEVSKLVTDLTKVHTECCHGDLLECADDRADLAKYICENQDSISSKLKECCEKPLLEKSHCIAEVENDEMPADLPSLAADFVESKDVCKNYAEAKDVFLGMFLYEYARRHPDYSVVLLLRLAKTYETTLEKCCAAADPHECYAKVFDEFKPLVEEPQNLIKQNCELFEQLGEYKFQNALLVRYTKKVPQVSTPTLVEVSRNLGKVGSKCCKHPEAKRMPCAEDYLSVVLNQLCVLHEKTPVSDRVTKCCTESLVNRRPCFSALEVDETYVPKEFNAETFTFHADICTLSEKERQIKKQTALVELVKHKPKATKEQLKAVMDDFAAFVEKCCKADDKETCFAEEGKKLVAASQAAGGSGGSGGSGGSGGSGGSGGSGGSGGSEVQLVESGGGLVQPGGSLRLSCAASGFTFNTYAMNWVRQAPGKGLEWVARIRSKYNNYATYYADSVKDRFTISRDDSKNTLYLQMNSLRAEDTAVYYCVRHGNFGNSYVSWFAYWGQGTMVTVSSASTKGPSVFPLAPSSKSTSGGTAALGCLVKDYFPEPVTVSWNSGALTSGVHTFPAVLQSSGLYSLSSVVTVPSSSLGTQTYICNVNHKPSNTKVDKRVEPKSCPPCGGGGSDIQMTQSPSSLSASVGDRVTITCRASENIYSYLAWYQQKPGKAPKLLIYNAKTLAEGVPSRFSGSGSGTDFTLTISSLQPEDFATYYCQHHYGTPRTFGGGTKVEIKGGGGSGGGGSGGGGSGGGGSQVQLVQSGAEVKKPGASVKVSCKASGYTFTSYWMNWVRQAPGQGLEWMGRIDPYDSETHYAQKLQGRVTMTTDTSTSTAYMELRSLRSDDTAVYYCARGGYDFDVGTLYWFFDVWGQGTTVTVSS

SEQ ID NO: 216 - protein, 1133 aa, Artificial Sequence
  source: /note="Description of Artificial Sequence: Synthetic CD3cap118-ALB-NC-hF3.5Fd-NKG2A sequence"
TGLDGQEELGGITQTPYKVSISGTTVILTGGGSGGGSGGGSEVAHRFKDLGEENFKALVLIAFAQYLQQCPFEDHVKLVNEVTEFAKTCVADESAENCDKSLHTLFGDKLCTVATLRETYGEMADCCAKQEPERNECFLQHKDDNPNLPRLVRPEVDVMCTAFHDNEETFLKKYLYEIARRHPYFYAPELLFFAKRYKAAFTECCQAADKAACLLPKLDELRDEGKASSAKQRLKCASLQKFGERAFKAWAVARLSQRFPKAEFAEVSKLVTDLTKVHTECCHGDLLECADDRADLAKYICENQDSISSKLKECCEKPLLEKSHCIAEVENDEMPADLPSLAADFVESKDVCKNYAEAKDVFLGMFLYEYARRHPDYSVVLLLRLAKTYETTLEKCCAAADPHECYAKVFDEFKPLVEEPQNLIKQNCELFEQLGEYKFQNALLVRYTKKVPQVSTPTLVEVSRNLGKVGSKCCKHPEAKRMPCAEDYLSVVLNQLCVLHEKTPVSDRVTKCCTESLVNRRPCFSALEVDETYVPKEFNAETFTFHADICTLSEKERQIKKQTALVELVKHKPKATKEQLKAVMDDFAAFVEKCCKADDKETCFAEEGKKLVAASQAAGGSGGSGGSGGSGGSGGSGGSGGSGGSEVQLVESGGGLVQPGGSLRLSCAASGFTFNTYAMNWVRQAPGKGLEWVARIRSKYNNYATYYADSVKDRFTISRDDSKNTLYLQMNSLRAEDTAVYYCVRHGNFGNSYVSWFAYWGQGTMVTVSSASTKGPSVFPLAPSSKSTSGGTAALGCLVKDYFPEPVTVSWNSGALTSGVHTFPAVLQSSGLYSLSSVVTVPSSSLGTQTYICNVNHKPSNTKVDKRVEPKSCPPCGGGGSDIQMTQSPSSLSASVGDRVTITCRASENIYSYLAWYQQKPGKAPKLLIYNAKTLAEGVPSRFSGSGSGTDFTLTISSLQPEDFATYYCQHHYGTPRTFGGGTKVEIKGGGGSGGGGSGGGGSGGGGSQVQLVQSGAEVKKPGASVKVSCKASGYTFTSYWMNWVRQAPGQGLEWMGRIDPYDSETHYAQKLQGRVTMTTDTSTSTAYMELRSLRSDDTAVYYCARGGYDFDVGTLYWFFDVWGQGTTVTVSS

SEQ ID NO: 217 - protein, 1131 aa, Artificial Sequence
  source: /note="Description of Artificial Sequence: Synthetic CD3cap105-ALB-NC-hF3.5Fd-NKG2A sequence"
QDGTEKMGGITQTPYKVSISGTTVILTGGGSGGGSGGGSEVAHRFKDLGEENFKALVLIAFAQYLQQCPFEDHVKLVNEVTEFAKTCVADESAENCDKSLHTLFGDKLCTVATLRETYGEMADCCAKQEPERNECFLQHKDDNPNLPRLVRPEVDVMCTAFHDNEETFLKKYLYEIARRHPYFYAPELLFFAKRYKAAFTECCQAADKAACLLPKLDELRDEGKASSAKQRLKCASLQKFGERAFKAWAVARLSQRFPKAEFAEVSKLVTDLTKVHTECCHGDLLECADDRADLAKYICENQDSISSKLKECCEKPLLEKSHCIAEVENDEMPADLPSLAADFVESKDVCKNYAEAKDVFLGMFLYEYARRHPDYSVVLLLRLAKTYETTLEKCCAAADPHECYAKVFDEFKPLVEEPQNLIKQNCELFEQLGEYKFQNALLVRYTKKVPQVSTPTLVEVSRNLGKVGSKCCKHPEAKRMPCAEDYLSVVLNQLCVLHEKTPVSDRVTKCCTESLVNRRPCFSALEVDETYVPKEFNAETFTFHADICTLSEKERQIKKQTALVELVKHKPKATKEQLKAVMDDFAAFVEKCCKADDKETCFAEEGKKLVAASQAAGGSGGSGGSGGSGGSGGSGGSGGSGGSEVQLVESGGGLVQPGGSLRLSCAASGFTFNTYAMNWVRQAPGKGLEWVARIRSKYNNYATYYADSVKDRFTISRDDSKNTLYLQMNSLRAEDTAVYYCVRHGNFGNSYVSWFAYWGQGTMVTVSSASTKGPSVFPLAPSSKSTSGGTAALGCLVKDYFPEPVTVSWNSGALTSGVHTFPAVLQSSGLYSLSSVVTVPSSSLGTQTYICNVNHKPSNTKVDKRVEPKSCPPCGGGGSDIQMTQSPSSLSASVGDRVTITCRASENIYSYLAWYQQKPGKAPKLLIYNAKTLAEGVPSRFSGSGSGTDFTLTISSLQPEDFATYYCQHHYGTPRTFGGGTKVEIKGGGGSGGGGSGGGGSGGGGSQVQLVQSGAEVKKPGASVKVSCKASGYTFTSYWMNWVRQAPGQGLEWMGRIDPYDSETHYAQKLQGRVTMTTDTSTSTAYMELRSLRSDDTAVYYCARGGYDFDVGTLYWFFDVWGQGTTVTVSS

SEQ ID NO: 218 - protein, 493 aa, Artificial Sequence
  source: /note="Description of Artificial Sequence: Synthetic h1F3.5FdMut3- KYK2.0Mut_ScFv(L-H) sequence"
GGSGGSEVQLVESGGGLVQPGGSLRLSCAASGFTFNTYAMNWVRQAPGKGLEWVARIGSGGNGYATYYADSVKDRFTISRDDSKNTLYLQMNSLRAEDTAVYYCVRHGNFGASARSWFAYWGQGTMVTVSSASTKGPSVFPLAPSSKSTSGGTAALGCLVKDYFPEPVTVSWNSGALTSGVHTFPAVLQSSGLYSLSSVVTVPSSSLGTQTYICNVNHKPSNTKVDKRVEPKSCPPCGGGGSQSALTQPASVSGSPGQSITISCSGSSSNIGNNAVNWYQQLPGKAPKLLIYADDLLPSGVSDRFSGSKSGTSAFLAISGLQSEDEADYYCAAWDDSLNGPVFGGGTKLTVLGGGGSGGGGSGGGGSGGGGSQVQLVESGGGLVKPGGSLRLSCAASGFTFSSYGMHWVRQAPGKGLEWVAFIRYDGSNKYYADSVKGRFTISRDNSKNTLYLQMNSLRAEDTAVYYCAKDAGEGDGTYFDYWGQGTTVTVSS

SEQ ID NO: 219 - protein, 494 aa, Artificial Sequence
  source: /note="Description of Artificial Sequence: Synthetic h1F3.5FdMut3- NKG2AMut_ScFv(L-H) sequence"
GGSGGSEVQLVESGGGLVQPGGSLRLSCAASGFTFNTYAMNWVRQAPGKGLEWVARIGSGGNGYATYYADSVKDRFTISRDDSKNTLYLQMNSLRAEDTAVYYCVRHGNFGASARSWFAYWGQGTMVTVSSASTKGPSVFPLAPSSKSTSGGTAALGCLVKDYFPEPVTVSWNSGALTSGVHTFPAVLQSSGLYSLSSVVTVPSSSLGTQTYICNVNHKPSNTKVDKRVEPKSCPPCGGGGSDIQMTQSPSSLSASVGDRVTITCRASENIYSALAWYQQKPGKAPKLLIYNAKTLAEGVPSRFSGSGSGTDFTLTISSLQPEDFATYYCQHHAGTPRTFGGGTKVEIKGGGGSGGGGSGGGGSGGGGSQVQLVQSGAEVKKPGASVKVSCKASGYTFTSYWMNWVRQAPGQGLEWMGRIDPYDSETHYAQKLQGRVTMTTDTSTSTAYMELRSLRSDDTAVYYCARGGYDFDVDTLYWFFDVWGQGTTVTVSS

SEQ ID NO: 220 - protein, 1130 aa, Artificial Sequence
  source: /note="Description of Artificial Sequence: Synthetic CD3cap137-ALB-MC2-hF3.5Fd-NKG2AMut sequence"
QDGNEEMGGITQTPYKVSISGTTVILTGGGSGGGSGGGSEVAHRFKDLGEENFKALVLIAFAQYLQQCPFEDHVKLVNEVTEFAKTCVADESAENCDKSLHTLFGDKLCTVATLRETYGEMADCCAKQEPERNECFLQHKDDNPNLPRLVRPEVDVMCTAFHDNEETFLKKYLYEIARRHPYFYAPELLFFAKRYKAAFTECCQAADKAACLLPKLDELRDEGKASSAKQRLKCASLQKFGERAFKAWAVARLSQRFPKAEFAEVSKLVTDLTKVHTECCHGDLLECADDRADLAKYICENQDSISSKLKECCEKPLLEKSHCIAEVENDEMPADLPSLAADFVESKDVCKNYAEAKDVFLGMFLYEYARRHPDYSVVLLLRLAKTYETTLEKCCAAADPHECYAKVFDEFKPLVEEPQNLIKQNCELFEQLGEYKFQNALLVRYTKKVPQVSTPTLVEVSRNLGKVGSKCCKHPEAKRMPCAEDYLSVVLNQLCVLHEKTPVSDRVTKCCTESLVNRRPCFSALEVDETYVPKEFNAETFTFHADICTLSEKERQIKKQTALVELVKHKPKATKEQLKAVMDDFAAFVEKCCKADDKETCFAEEGKKLVAASQAAGGSGGSPLGLAGLSGRSDNHGGSGGSEVQLVESGGGLVQPGGSLRLSCAASGFTFNTYAMNWVRQAPGKGLEWVARIRSKYNNYATYYADSVKDRFTISRDDSKNTLYLQMNSLRAEDTAVYYCVRHGNFGNSYVSWFAYWGQGTMVTVSSASTKGPSVFPLAPSSKSTSGGTAALGCLVKDYFPEPVTVSWNSGALTSGVHTFPAVLQSSGLYSLSSVVTVPSSSLGTQTYICNVNHKPSNTKVDKRVEPKSCPPCGGGGSDIQMTQSPSSLSASVGDRVTITCRASENIYSALAWYQQKPGKAPKLLIYNAKTLAEGVPSRFSGSGSGTDFTLTISSLQPEDFATYYCQHHAGTPRTFGGGTKVEIKGGGGSGGGGSGGGGSGGGGSQVQLVQSGAEVKKPGASVKVSCKASGYTFTSYWMNWVRQAPGQGLEWMGRIDPYDSETHYAQKLQGRVTMTTDTSTSTAYMELRSLRSDDTAVYYCARGGYDFDVDTLYWFFDVWGQGTTVTVSS

SEQ ID NO: 221 - protein, 1137 aa, Artificial Sequence
  source: /note="Description of Artificial Sequence: Synthetic CD3cap137-ALB-MC3-hF3.5Fd-NKG2AMut sequence"
QDGNEEMGGITQTPYKVSISGTTVILTGGGSGGGSGGGSEVAHRFKDLGEENFKALVLIAFAQYLQQCPFEDHVKLVNEVTEFAKTCVADESAENCDKSLHTLFGDKLCTVATLRETYGEMADCCAKQEPERNECFLQHKDDNPNLPRLVRPEVDVMCTAFHDNEETFLKKYLYEIARRHPYFYAPELLFFAKRYKAAFTECCQAADKAACLLPKLDELRDEGKASSAKQRLKCASLQKFGERAFKAWAVARLSQRFPKAEFAEVSKLVTDLTKVHTECCHGDLLECADDRADLAKYICENQDSISSKLKECCEKPLLEKSHCIAEVENDEMPADLPSLAADFVESKDVCKNYAEAKDVFLGMFLYEYARRHPDYSVVLLLRLAKTYETTLEKCCAAADPHECYAKVFDEFKPLVEEPQNLIKQNCELFEQLGEYKFQNALLVRYTKKVPQVSTPTLVEVSRNLGKVGSKCCKHPEAKRMPCAEDYLSVVLNQLCVLHEKTPVSDRVTKCCTESLVNRRPCFSALEVDETYVPKEFNAETFTFHADICTLSEKERQIKKQTALVELVKHKPKATKEQLKAVMDDFAAFVEKCCKADDKETCFAEEGKKLVAASQAAGGSGGSPLGLAGGSGRKGSLSGRSDNHGGSGGSEVQLVESGGGLVQPGGSLRLSCAASGFTFNTYAMNWVRQAPGKGLEWVARIRSKYNNYATYYADSVKDRFTISRDDSKNTLYLQMNSLRAEDTAVYYCVRHGNFGNSYVSWFAYWGQGTMVTVSSASTKGPSVFPLAPSSKSTSGGTAALGCLVKDYFPEPVTVSWNSGALTSGVHTFPAVLQSSGLYSLSSVVTVPSSSLGTQTYICNVNHKPSNTKVDKRVEPKSCPPCGGGGSDIQMTQSPSSLSASVGDRVTITCRASENIYSALAWYQQKPGKAPKLLIYNAKTLAEGVPSRFSGSGSGTDFTLTISSLQPEDFATYYCQHHAGTPRTFGGGTKVEIKGGGGSGGGGSGGGGSGGGGSQVQLVQSGAEVKKPGASVKVSCKASGYTFTSYWMNWVRQAPGQGLEWMGRIDPYDSETHYAQKLQGRVTMTTDTSTSTAYMELRSLRSDDTAVYYCARGGYDFDVDTLYWFFDVWGQGTTVTVSS

SEQ ID NO: 222 - protein, 1131 aa, Artificial Sequence
  source: /note="Description of Artificial Sequence: Synthetic CD3cap137-ALB-NC-hF3.5Fd-NKG2AMut sequence"
QDGNEEMGGITQTPYKVSISGTTVILTGGGSGGGSGGGSEVAHRFKDLGEENFKALVLIAFAQYLQQCPFEDHVKLVNEVTEFAKTCVADESAENCDKSLHTLFGDKLCTVATLRETYGEMADCCAKQEPERNECFLQHKDDNPNLPRLVRPEVDVMCTAFHDNEETFLKKYLYEIARRHPYFYAPELLFFAKRYKAAFTECCQAADKAACLLPKLDELRDEGKASSAKQRLKCASLQKFGERAFKAWAVARLSQRFPKAEFAEVSKLVTDLTKVHTECCHGDLLECADDRADLAKYICENQDSISSKLKECCEKPLLEKSHCIAEVENDEMPADLPSLAADFVESKDVCKNYAEAKDVFLGMFLYEYARRHPDYSVVLLLRLAKTYETTLEKCCAAADPHECYAKVFDEFKPLVEEPQNLIKQNCELFEQLGEYKFQNALLVRYTKKVPQVSTPTLVEVSRNLGKVGSKCCKHPEAKRMPCAEDYLSVVLNQLCVLHEKTPVSDRVTKCCTESLVNRRPCFSALEVDETYVPKEFNAETFTFHADICTLSEKERQIKKQTALVELVKHKPKATKEQLKAVMDDFAAFVEKCCKADDKETCFAEEGKKLVAASQAAGGSGGSGGSGGSGGSGGSGGSGGSGGSEVQLVESGGGLVQPGGSLRLSCAASGFTFNTYAMNWVRQAPGKGLEWVARIRSKYNNYATYYADSVKDRFTISRDDSKNTLYLQMNSLRAEDTAVYYCVRHGNFGNSYVSWFAYWGQGTMVTVSSASTKGPSVFPLAPSSKSTSGGTAALGCLVKDYFPEPVTVSWNSGALTSGVHTFPAVLQSSGLYSLSSVVTVPSSSLGTQTYICNVNHKPSNTKVDKRVEPKSCPPCGGGGSDIQMTQSPSSLSASVGDRVTITCRASENIYSALAWYQQKPGKAPKLLIYNAKTLAEGVPSRFSGSGSGTDFTLTISSLQPEDFATYYCQHHAGTPRTFGGGTKVEIKGGGGSGGGGSGGGGSGGGGSQVQLVQSGAEVKKPGASVKVSCKASGYTFTSYWMNWVRQAPGQGLEWMGRIDPYDSETHYAQKLQGRVTMTTDTSTSTAYMELRSLRSDDTAVYYCARGGYDFDVDTLYWFFDVWGQGTTVTVSS

SEQ ID NO: 223 - protein, 496 aa, Artificial Sequence
  source: /note="Description of Artificial Sequence: Synthetic h1F3.5Fd-NKG2D_cl1_ScFv(L-H) sequence"
GGSGGSEVQLVESGGGLVQPGGSLRLSCAASGFTFNTYAMNWVRQAPGKGLEWVARIRSKYNNYATYYADSVKDRFTISRDDSKNTLYLQMNSLRAEDTAVYYCVRHGNFGNSYVSWFAYWGQGTMVTVSSASTKGPSVFPLAPSSKSTSGGTAALGCLVKDYFPEPVTVSWNSGALTSGVHTFPAVLQSSGLYSLSSVVTVPSSSLGTQTYICNVNHKPSNTKVDKRVEPKSCPPCGGGGSDIVLTQSPASLAVSLGQRAIISCKASQSVSFAGSNLMHWYQQKPGQQPKLLIYRASNLEVGVPTRFSGSGSGTDFTLNIHPVDEDDAATYYCQQSREYPFTFGSGTKLEIKGGGGSGGGGSGGGGSGGGGSEVQLQQSGPELVKPGASVKISCKASAFNFTSYYLHWVKQGPGQGLEWIGWIYPGSGDTKYNEKFKGKATLTADTSSSAANMKLSSLTSEDSAVYYCARNRIFDSYYVDSMDYWGQGTSVTVSS

SEQ ID NO: 224 - protein, 496 aa, Artificial Sequence
  source: /note="Description of Artificial Sequence: Synthetic h1F3.5Fd-NKG2D_cl1_ScFv(H-L) sequence"
GGSGGSEVQLVESGGGLVQPGGSLRLSCAASGFTFNTYAMNWVRQAPGKGLEWVARIRSKYNNYATYYADSVKDRFTISRDDSKNTLYLQMNSLRAEDTAVYYCVRHGNFGNSYVSWFAYWGQGTMVTVSSASTKGPSVFPLAPSSKSTSGGTAALGCLVKDYFPEPVTVSWNSGALTSGVHTFPAVLQSSGLYSLSSVVTVPSSSLGTQTYICNVNHKPSNTKVDKRVEPKSCPPCGGGGSEVQLQQSGPELVKPGASVKISCKASAFNFTSYYLHWVKQGPGQGLEWIGWIYPGSGDTKYNEKFKGKATLTADTSSSAANMKLSSLTSEDSAVYYCARNRIFDSYYVDSMDYWGQGTSVTVSSGGGGSGGGGSGGGGSGGGGSDIVLTQSPASLAVSLGQRAIISCKASQSVSFAGSNLMHWYQQKPGQQPKLLIYRASNLEVGVPTRFSGSGSGTDFTLNIHPVDEDDAATYYCQQSREYPFTFGSGTKLEIK

SEQ ID NO: 225 - protein, 496 aa, Artificial Sequence
  source: /note="Description of Artificial Sequence: Synthetic h1F3.5Fd-NKG2D_cl9_ScFv(L-H) sequence"
GGSGGSEVQLVESGGGLVQPGGSLRLSCAASGFTFNTYAMNWVRQAPGKGLEWVARIRSKYNNYATYYADSVKDRFTISRDDSKNTLYLQMNSLRAEDTAVYYCVRHGNFGNSYVSWFAYWGQGTMVTVSSASTKGPSVFPLAPSSKSTSGGTAALGCLVKDYFPEPVTVSWNSGALTSGVHTFPAVLQSSGLYSLSSVVTVPSSSLGTQTYICNVNHKPSNTKVDKRVEPKSCPPCGGGGSDVLMTQTPLSLPVSLGDQASISCRSSQSIVHTNGNTYLEWYLQKPGQSPKLLIYRVFNRFSGVPDRFSGSGSGTEFTLKISRVEAEDLGVYYCFQGSHVPFTFGAGTKLELKGGGGSGGGGSGGGGSGGGGSEVKLLQSGGGLVQPGGSLKLSCAASGIDLSRYWMSWVRRAPGKGLEWIGEINPDSSTINYAPSLKDKFIISRDNAKNTLSLQMRKVRSEDTALYFCIRRRYYGSSYWYFDVWGTGTTVTVSS

SEQ ID NO: 226 - protein, 496 aa, Artificial Sequence
  source: /note="Description of Artificial Sequence: Synthetic h1F3.5Fd-NKG2D_cl9_ScFv(H-L) sequence"
GGSGGSEVQLVESGGGLVQPGGSLRLSCAASGFTFNTYAMNWVRQAPGKGLEWVARIRSKYNNYATYYADSVKDRFTISRDDSKNTLYLQMNSLRAEDTAVYYCVRHGNFGNSYVSWFAYWGQGTMVTVSSASTKGPSVFPLAPSSKSTSGGTAALGCLVKDYFPEPVTVSWNSGALTSGVHTFPAVLQSSGLYSLSSVVTVPSSSLGTQTYICNVNHKPSNTKVDKRVEPKSCPPCGGGGSEVKLLQSGGGLVQPGGSLKLSCAASGIDLSRYWMSWVRRAPGKGLEWIGEINPDSSTINYAPSLKDKFIISRDNAKNTLSLQMRKVRSEDTALYFCIRRRYYGSSYWYFDVWGTGTTVTVSSGGGGSGGGGSGGGGSGGGGSDVLMTQTPLSLPVSLGDQASISCRSSQSIVHTNGNTYLEWYLQKPGQSPKLLIYRVFNRFSGVPDRFSGSGSGTEFTLKISRVEAEDLGVYYCFQGSHVPFTFGAGTKLELK

SEQ ID NO: 227 - protein, 495 aa, Artificial Sequence
  source: /note="Description of Artificial Sequence: Synthetic h1F3.5Fd-NKG2D_cl10_ScFv(L-H) sequence"
GGSGGSEVQLVESGGGLVQPGGSLRLSCAASGFTFNTYAMNWVRQAPGKGLEWVARIRSKYNNYATYYADSVKDRFTISRDDSKNTLYLQMNSLRAEDTAVYYCVRHGNFGNSYVSWFAYWGQGTMVTVSSASTKGPSVFPLAPSSKSTSGGTAALGCLVKDYFPEPVTVSWNSGALTSGVHTFPAVLQSSGLYSLSSVVTVPSSSLGTQTYICNVNHKPSNTKVDKRVEPKSCPPCGGGGSDIVLTQSPASLAMSLGKRATISCRASESVSIMGTNLINWYQQKLGQPPKLLIYHASNLETGVPARFSGSGSRTDFTLTIDPVEEDDVAVYYCLQGRKIPRTFGGGTKLEIKGGGGSGGGGSGGGGSGGGGSQVQLQQPGAELVKPGASVKLSCKASGYTFTTYWIQWIKQRPGQGLEWIGEIDPSDIFTNYNQKFKGKATLTVDTSSSTAYMQLSSLTSEDSAVYYCARGVYDGYYVGYFDVWGTGTTVTVSS

SEQ ID NO: 228 - protein, 495 aa, Artificial Sequence
  source: /note="Description of Artificial Sequence: Synthetic h1F3.5Fd-NKG2D_cl10_ScFv(H-L) sequence"
GGSGGSEVQLVESGGGLVQPGGSLRLSCAASGFTFNTYAMNWVRQAPGKGLEWVARIRSKYNNYATYYADSVKDRFTISRDDSKNTLYLQMNSLRAEDTAVYYCVRHGNFGNSYVSWFAYWGQGTMVTVSSASTKGPSVFPLAPSSKSTSGGTAALGCLVKDYFPEPVTVSWNSGALTSGVHTFPAVLQSSGLYSLSSVVTVPSSSLGTQTYICNVNHKPSNTKVDKRVEPKSCPPCGGGGSQVQLQQPGAELVKPGASVKLSCKASGYTFTTYWIQWIKQRPGQGLEWIGEIDPSDIFTNYNQKFKGKATLTVDTSSSTAYMQLSSLTSEDSAVYYCARGVYDGYYVGYFDVWGTGTTVTVSSGGGGSGGGGSGGGGSGGGGSDIVLTQSPASLAMSLGKRATISCRASESVSIMGTNLINWYQQKLGQPPKLLIYHASNLETGVPARFSGSGSRTDFTLTIDPVEEDDVAVYYCLQGRKIPRTFGGGTKLEIK

SEQ ID NO: 229 - protein, 489 aa, Artificial Sequence
  source: /note="Description of Artificial Sequence: Synthetic h1F3.5Fd-NKG2D_cl19_ScFv(L-H) sequence"
GGSGGSEVQLVESGGGLVQPGGSLRLSCAASGFTFNTYAMNWVRQAPGKGLEWVARIRSKYNNYATYYADSVKDRFTISRDDSKNTLYLQMNSLRAEDTAVYYCVRHGNFGNSYVSWFAYWGQGTMVTVSSASTKGPSVFPLAPSSKSTSGGTAALGCLVKDYFPEPVTVSWNSGALTSGVHTFPAVLQSSGLYSLSSVVTVPSSSLGTQTYICNVNHKPSNTKVDKRVEPKSCPPCGGGGSDILLTQSPAILSVSPGERVSFSCRASQSIGTSIHWYQQRTNVSPRLLIKYASESISGIPSRFSGSGSGTDFTLSINNVESEDIADYYCQHSNRWPLTFGAGTKLELKGGGGSGGGGSGGGGSGGGGSQVQLKESGPGLVAPSQSLSITCTVSGFSLTSYAISWFRQPPGKGLECLGVIWTGGGTNYNSVFKSRLSIIKDNSKSQVFLKMNSLQTDDTARYYCARKGDEGYWGYFDVWGTGTTVTVSS

SEQ ID NO: 230 - protein, 489 aa, Artificial Sequence
  source: /note="Description of Artificial Sequence: Synthetic h1F3.5Fd-NKG2D_cl19_ScFv(H-L) sequence"
GGSGGSEVQLVESGGGLVQPGGSLRLSCAASGFTFNTYAMNWVRQAPGKGLEWVARIRSKYNNYATYYADSVKDRFTISRDDSKNTLYLQMNSLRAEDTAVYYCVRHGNFGNSYVSWFAYWGQGTMVTVSSASTKGPSVFPLAPSSKSTSGGTAALGCLVKDYFPEPVTVSWNSGALTSGVHTFPAVLQSSGLYSLSSVVTVPSSSLGTQTYICNVNHKPSNTKVDKRVEPKSCPPCGGGGSQVQLKESGPGLVAPSQSLSITCTVSGFSLTSYAISWFRQPPGKGLECLGVIWTGGGTNYNSVFKSRLSIIKDNSKSQVFLKMNSLQTDDTARYYCARKGDEGYWGYFDVWGTGTTVTVSSGGGGSGGGGSGGGGSGGGGSDILLTQSPAILSVSPGERVSFSCRASQSIGTSIHWYQQRTNVSPRLLIKYASESISGIPSRFSGSGSGTDFTLSINNVESEDIADYYCQHSNRWPLTFGAGTKLELK

SEQ ID NO: 231 - protein, 580 aa, Artificial Sequence
  source: /note="Description of Artificial Sequence: Synthetic h1F3.5Fd- NKG2A_ScFv(L-H)_MC2_32GS-Acap3.1 sequence"
GGSGGSEVQLVESGGGLVQPGGSLRLSCAASGFTFNTYAMNWVRQAPGKGLEWVARIRSKYNNYATYYADSVKDRFTISRDDSKNTLYLQMNSLRAEDTAVYYCVRHGNFGNSYVSWFAYWGQGTMVTVSSASTKGPSVFPLAPSSKSTSGGTAALGCLVKDYFPEPVTVSWNSGALTSGVHTFPAVLQSSGLYSLSSVVTVPSSSLGTQTYICNVNHKPSNTKVDKRVEPKSCPPCGGGGSDIQMTQSPSSLSASVGDRVTITCRASENIYSYLAWYQQKPGKAPKLLIYNAKTLAEGVPSRFSGSGSGTDFTLTISSLQPEDFATYYCQHHYGTPRTFGGGTKVEIKGGGGSGGGGSGGGGSGGGGSQVQLVQSGAEVKKPGASVKVSCKASGYTFTSYWMNWVRQAPGQGLEWMGRIDPYDSETHYAQKLQGRVTMTTDTSTSTAYMELRSLRSDDTAVYYCARGGYDFDVGTLYWFFDVWGQGTTVTVSSGGSGGSPLGLAGLSGRSDNHGGGGSGGGGSGGGGSGGGGSGGSGGSLSIDNEEEMKFLSIISPSSWIGVFNSAVLQVNRLKSAQSG

SEQ ID NO: 232 - protein, 590 aa, Artificial Sequence
  source: /note="Description of Artificial Sequence: Synthetic h1F3.5Fd- NKG2A_ScFv(L-H)_MC2_42GS-Acap3.1 sequence"
GGSGGSEVQLVESGGGLVQPGGSLRLSCAASGFTFNTYAMNWVRQAPGKGLEWVARIRSKYNNYATYYADSVKDRFTISRDDSKNTLYLQMNSLRAEDTAVYYCVRHGNFGNSYVSWFAYWGQGTMVTVSSASTKGPSVFPLAPSSKSTSGGTAALGCLVKDYFPEPVTVSWNSGALTSGVHTFPAVLQSSGLYSLSSVVTVPSSSLGTQTYICNVNHKPSNTKVDKRVEPKSCPPCGGGGSDIQMTQSPSSLSASVGDRVTITCRASENIYSYLAWYQQKPGKAPKLLIYNAKTLAEGVPSRFSGSGSGTDFTLTISSLQPEDFATYYCQHHYGTPRTFGGGTKVEIKGGGGSGGGGSGGGGSGGGGSQVQLVQSGAEVKKPGASVKVSCKASGYTFTSYWMNWVRQAPGQGLEWMGRIDPYDSETHYAQKLQGRVTMTTDTSTSTAYMELRSLRSDDTAVYYCARGGYDFDVGTLYWFFDVWGQGTTVTVSSGGSGGSPLGLAGLSGRSDNHGGGGSGGGGSGGGGSGGGGSGGGGSGGGGSGGSGGSLSIDNEEEMKFLSIISPSSWIGVFNSAVLQVNRLKSAQSG

SEQ ID NO: 233 - protein, 570 aa, Artificial Sequence
  source: /note="Description of Artificial Sequence: Synthetic h1F3.5Fd- NKG2A_ScFv(L-H)_MC2_32GS-Acap4.1 sequence"
GGSGGSEVQLVESGGGLVQPGGSLRLSCAASGFTFNTYAMNWVRQAPGKGLEWVARIRSKYNNYATYYADSVKDRFTISRDDSKNTLYLQMNSLRAEDTAVYYCVRHGNFGNSYVSWFAYWGQGTMVTVSSASTKGPSVFPLAPSSKSTSGGTAALGCLVKDYFPEPVTVSWNSGALTSGVHTFPAVLQSSGLYSLSSVVTVPSSSLGTQTYICNVNHKPSNTKVDKRVEPKSCPPCGGGGSDIQMTQSPSSLSASVGDRVTITCRASENIYSYLAWYQQKPGKAPKLLIYNAKTLAEGVPSRFSGSGSGTDFTLTISSLQPEDFATYYCQHHYGTPRTFGGGTKVEIKGGGGSGGGGSGGGGSGGGGSQVQLVQSGAEVKKPGASVKVSCKASGYTFTSYWMNWVRQAPGQGLEWMGRIDPYDSETHYAQKLQGRVTMTTDTSTSTAYMELRSLRSDDTAVYYCARGGYDFDVGTLYWFFDVWGQGTTVTVSSGGSGGSPLGLAGLSGRSDNHGGGGSGGGGSGGGGSGGGGSGGSGGSAFKHEIKDSDNAELNSAVLQVNRLKSAQSG

SEQ ID NO: 234 - protein, 580 aa, Artificial Sequence
  source: /note="Description of Artificial Sequence: Synthetic h1F3.5Fd- NKG2A_ScFv(L-H)_MC2_42GS-Acap4.1 sequence"
GGSGGSEVQLVESGGGLVQPGGSLRLSCAASGFTFNTYAMNWVRQAPGKGLEWVARIRSKYNNYATYYADSVKDRFTISRDDSKNTLYLQMNSLRAEDTAVYYCVRHGNFGNSYVSWFAYWGQGTMVTVSSASTKGPSVFPLAPSSKSTSGGTAALGCLVKDYFPEPVTVSWNSGALTSGVHTFPAVLQSSGLYSLSSVVTVPSSSLGTQTYICNVNHKPSNTKVDKRVEPKSCPPCGGGGSDIQMTQSPSSLSASVGDRVTITCRASENIYSYLAWYQQKPGKAPKLLIYNAKTLAEGVPSRFSGSGSGTDFTLTISSLQPEDFATYYCQHHYGTPRTFGGGTKVEIKGGGGSGGGGSGGGGSGGGGSQVQLVQSGAEVKKPGASVKVSCKASGYTFTSYWMNWVRQAPGQGLEWMGRIDPYDSETHYAQKLQGRVTMTTDTSTSTAYMELRSLRSDDTAVYYCARGGYDFDVGTLYWFFDVWGQGTTVTVSSGGSGGSPLGLAGLSGRSDNHGGGGSGGGGSGGGGSGGGGSGGGGSGGGGSGGSGGSAFKHEIKDSDNAELNSAVLQVNRLKSAQSG

SEQ ID NO: 235 - protein, 555 aa, Artificial Sequence
  source: /note="Description of Artificial Sequence: Synthetic h1F3.5Fd- NKG2A_ScFv(L-H)_MC2_32GS-Acap9 sequence"
GGSGGSEVQLVESGGGLVQPGGSLRLSCAASGFTFNTYAMNWVRQAPGKGLEWVARIRSKYNNYATYYADSVKDRFTISRDDSKNTLYLQMNSLRAEDTAVYYCVRHGNFGNSYVSWFAYWGQGTMVTVSSASTKGPSVFPLAPSSKSTSGGTAALGCLVKDYFPEPVTVSWNSGALTSGVHTFPAVLQSSGLYSLSSVVTVPSSSLGTQTYICNVNHKPSNTKVDKRVEPKSCPPCGGGGSDIQMTQSPSSLSASVGDRVTITCRASENIYSYLAWYQQKPGKAPKLLIYNAKTLAEGVPSRFSGSGSGTDFTLTISSLQPEDFATYYCQHHYGTPRTFGGGTKVEIKGGGGSGGGGSGGGGSGGGGSQVQLVQSGAEVKKPGASVKVSCKASGYTFTSYWMNWVRQAPGQGLEWMGRIDPYDSETHYAQKLQGRVTMTTDTSTSTAYMELRSLRSDDTAVYYCARGGYDFDVGTLYWFFDVWGQGTTVTVSSGGSGGSPLGLAGLSGRSDNHGGGGSGGGGSGGGGSGGGGSGGSGGSARHCGHSPEEWITYS

SEQ ID NO: 236 - protein, 1216 aa, Artificial Sequence
  source: /note="Description of Artificial Sequence: Synthetic CD3cap137-ALB-MC2-h1F3.5Fd- NKG2A(L-H)-MC2-32GS-Acap3.1 sequence"
QDGNEEMGGITQTPYKVSISGTTVILTGGGSGGGSGGGSEVAHRFKDLGEENFKALVLIAFAQYLQQCPFEDHVKLVNEVTEFAKTCVADESAENCDKSLHTLFGDKLCTVATLRETYGEMADCCAKQEPERNECFLQHKDDNPNLPRLVRPEVDVMCTAFHDNEETFLKKYLYEIARRHPYFYAPELLFFAKRYKAAFTECCQAADKAACLLPKLDELRDEGKASSAKQRLKCASLQKFGERAFKAWAVARLSQRFPKAEFAEVSKLVTDLTKVHTECCHGDLLECADDRADLAKYICENQDSISSKLKECCEKPLLEKSHCIAEVENDEMPADLPSLAADFVESKDVCKNYAEAKDVFLGMFLYEYARRHPDYSVVLLLRLAKTYETTLEKCCAAADPHECYAKVFDEFKPLVEEPQNLIKQNCELFEQLGEYKFQNALLVRYTKKVPQVSTPTLVEVSRNLGKVGSKCCKHPEAKRMPCAEDYLSVVLNQLCVLHEKTPVSDRVTKCCTESLVNRRPCFSALEVDETYVPKEFNAETFTFHADICTLSEKERQIKKQTALVELVKHKPKATKEQLKAVMDDFAAFVEKCCKADDKETCFAEEGKKLVAASQAAGGSGGSPLGLAGLSGRSDNHGGSGGSEVQLVESGGGLVQPGGSLRLSCAASGFTFNTYAMNWVRQAPGKGLEWVARIRSKYNNYATYYADSVKDRFTISRDDSKNTLYLQMNSLRAEDTAVYYCVRHGNFGNSYVSWFAYWGQGTMVTVSSASTKGPSVFPLAPSSKSTSGGTAALGCLVKDYFPEPVTVSWNSGALTSGVHTFPAVLQSSGLYSLSSVVTVPSSSLGTQTYICNVNHKPSNTKVDKRVEPKSCPPCGGGGSDIQMTQSPSSLSASVGDRVTITCRASENIYSYLAWYQQKPGKAPKLLIYNAKTLAEGVPSRFSGSGSGTDFTLTISSLQPEDFATYYCQHHYGTPRTFGGGTKVEIKGGGGSGGGGSGGGGSGGGGSQVQLVQSGAEVKKPGASVKVSCKASGYTFTSYWMNWVRQAPGQGLEWMGRIDPYDSETHYAQKLQGRVTMTTDTSTSTAYMELRSLRSDDTAVYYCARGGYDFDVGTLYWFFDVWGQGTTVTVSSGGSGGSPLGLAGLSGRSDNHGGGGSGGGGSGGGGSGGGGSGGSGGSLSIDNEEEMKFLSIISPSSWIGVFNSAVLQVNRLKSAQSG

SEQ ID NO: 237 - protein, 1226 aa, Artificial Sequence
  source: /note="Description of Artificial Sequence: Synthetic CD3cap137-ALB-MC2-h1F3.5Fd- NKG2A(L-H)-MC2-42GS-Acap3.1 sequence"
QDGNEEMGGITQTPYKVSISGTTVILTGGGSGGGSGGGSEVAHRFKDLGEENFKALVLIAFAQYLQQCPFEDHVKLVNEVTEFAKTCVADESAENCDKSLHTLFGDKLCTVATLRETYGEMADCCAKQEPERNECFLQHKDDNPNLPRLVRPEVDVMCTAFHDNEETFLKKYLYEIARRHPYFYAPELLFFAKRYKAAFTECCQAADKAACLLPKLDELRDEGKASSAKQRLKCASLQKFGERAFKAWAVARLSQRFPKAEFAEVSKLVTDLTKVHTECCHGDLLECADDRADLAKYICENQDSISSKLKECCEKPLLEKSHCIAEVENDEMPADLPSLAADFVESKDVCKNYAEAKDVFLGMFLYEYARRHPDYSVVLLLRLAKTYETTLEKCCAAADPHECYAKVFDEFKPLVEEPQNLIKQNCELFEQLGEYKFQNALLVRYTKKVPQVSTPTLVEVSRNLGKVGSKCCKHPEAKRMPCAEDYLSVVLNQLCVLHEKTPVSDRVTKCCTESLVNRRPCFSALEVDETYVPKEFNAETFTFHADICTLSEKERQIKKQTALVELVKHKPKATKEQLKAVMDDFAAFVEKCCKADDKETCFAEEGKKLVAASQAAGGSGGSPLGLAGLSGRSDNHGGSGGSEVQLVESGGGLVQPGGSLRLSCAASGFTFNTYAMNWVRQAPGKGLEWVARIRSKYNNYATYYADSVKDRFTISRDDSKNTLYLQMNSLRAEDTAVYYCVRHGNFGNSYVSWFAYWGQGTMVTVSSASTKGPSVFPLAPSSKSTSGGTAALGCLVKDYFPEPVTVSWNSGALTSGVHTFPAVLQSSGLYSLSSVVTVPSSSLGTQTYICNVNHKPSNTKVDKRVEPKSCPPCGGGGSDIQMTQSPSSLSASVGDRVTITCRASENIYSYLAWYQQKPGKAPKLLIYNAKTLAEGVPSRFSGSGSGTDFTLTISSLQPEDFATYYCQHHYGTPRTFGGGTKVEIKGGGGSGGGGSGGGGSGGGGSQVQLVQSGAEVKKPGASVKVSCKASGYTFTSYWMNWVRQAPGQGLEWMGRIDPYDSETHYAQKLQGRVTMTTDTSTSTAYMELRSLRSDDTAVYYCARGGYDFDVGTLYWFFDVWGQGTTVTVSSGGSGGSPLGLAGLSGRSDNHGGGGSGGGGSGGGGSGGGGSGGGGSGGGGSGGSGGSLSIDNEEEMKFLSIISPSSWIGVFNSAVLQVNRLKSAQSG

SEQ ID NO: 238 - protein, 1206 aa, Artificial Sequence
  source: /note="Description of Artificial Sequence: Synthetic CD3cap137-ALB-MC2-h1F3.5Fd- NKG2A(L-H)-MC2-32GS-Acap4.1 sequence"
QDGNEEMGGITQTPYKVSISGTTVILTGGGSGGGSGGGSEVAHRFKDLGEENFKALVLIAFAQYLQQCPFEDHVKLVNEVTEFAKTCVADESAENCDKSLHTLFGDKLCTVATLRETYGEMADCCAKQEPERNECFLQHKDDNPNLPRLVRPEVDVMCTAFHDNEETFLKKYLYEIARRHPYFYAPELLFFAKRYKAAFTECCQAADKAACLLPKLDELRDEGKASSAKQRLKCASLQKFGERAFKAWAVARLSQRFPKAEFAEVSKLVTDLTKVHTECCHGDLLECADDRADLAKYICENQDSISSKLKECCEKPLLEKSHCIAEVENDEMPADLPSLAADFVESKDVCKNYAEAKDVFLGMFLYEYARRHPDYSVVLLLRLAKTYETTLEKCCAAADPHECYAKVFDEFKPLVEEPQNLIKQNCELFEQLGEYKFQNALLVRYTKKVPQVSTPTLVEVSRNLGKVGSKCCKHPEAKRMPCAEDYLSVVLNQLCVLHEKTPVSDRVTKCCTESLVNRRPCFSALEVDETYVPKEFNAETFTFHADICTLSEKERQIKKQTALVELVKHKPKATKEQLKAVMDDFAAFVEKCCKADDKETCFAEEGKKLVAASQAAGGSGGSPLGLAGLSGRSDNHGGSGGSEVQLVESGGGLVQPGGSLRLSCAASGFTFNTYAMNWVRQAPGKGLEWVARIRSKYNNYATYYADSVKDRFTISRDDSKNTLYLQMNSLRAEDTAVYYCVRHGNFGNSYVSWFAYWGQGTMVTVSSASTKGPSVFPLAPSSKSTSGGTAALGCLVKDYFPEPVTVSWNSGALTSGVHTFPAVLQSSGLYSLSSVVTVPSSSLGTQTYICNVNHKPSNTKVDKRVEPKSCPPCGGGGSDIQMTQSPSSLSASVGDRVTITCRASENIYSYLAWYQQKPGKAPKLLIYNAKTLAEGVPSRFSGSGSGTDFTLTISSLQPEDFATYYCQHHYGTPRTFGGGTKVEIKGGGGSGGGGSGGGGSGGGGSQVQLVQSGAEVKKPGASVKVSCKASGYTFTSYWMNWVRQAPGQGLEWMGRIDPYDSETHYAQKLQGRVTMTTDTSTSTAYMELRSLRSDDTAVYYCARGGYDFDVGTLYWFFDVWGQGTTVTVSSGGSGGSPLGLAGLSGRSDNHGGGGSGGGGSGGGGSGGGGSGGSGGSAFKHEIKDSDNAELNSAVLQVNRLKSAQSG

SEQ ID NO: 239 - protein, 1216 aa, Artificial Sequence
  source: /note="Description of Artificial Sequence: Synthetic CD3cap137-ALB-MC2-h1F3.5Fd- NKG2A(L-H)-MC2-42GS-Acap4.1 sequence"
QDGNEEMGGITQTPYKVSISGTTVILTGGGSGGGSGGGSEVAHRFKDLGEENFKALVLIAFAQYLQQCPFEDHVKLVNEVTEFAKTCVADESAENCDKSLHTLFGDKLCTVATLRETYGEMADCCAKQEPERNECFLQHKDDNPNLPRLVRPEVDVMCTAFHDNEETFLKKYLYEIARRHPYFYAPELLFFAKRYKAAFTECCQAADKAACLLPKLDELRDEGKASSAKQRLKCASLQKFGERAFKAWAVARLSQRFPKAEFAEVSKLVTDLTKVHTECCHGDLLECADDRADLAKYICENQDSISSKLKECCEKPLLEKSHCIAEVENDEMPADLPSLAADFVESKDVCKNYAEAKDVFLGMFLYEYARRHPDYSVVLLLRLAKTYETTLEKCCAAADPHECYAKVFDEFKPLVEEPQNLIKQNCELFEQLGEYKFQNALLVRYTKKVPQVSTPTLVEVSRNLGKVGSKCCKHPEAKRMPCAEDYLSVVLNQLCVLHEKTPVSDRVTKCCTESLVNRRPCFSALEVDETYVPKEFNAETFTFHADICTLSEKERQIKKQTALVELVKHKPKATKEQLKAVMDDFAAFVEKCCKADDKETCFAEEGKKLVAASQAAGGSGGSPLGLAGLSGRSDNHGGSGGSEVQLVESGGGLVQPGGSLRLSCAASGFTFNTYAMNWVRQAPGKGLEWVARIRSKYNNYATYYADSVKDRFTISRDDSKNTLYLQMNSLRAEDTAVYYCVRHGNFGNSYVSWFAYWGQGTMVTVSSASTKGPSVFPLAPSSKSTSGGTAALGCLVKDYFPEPVTVSWNSGALTSGVHTFPAVLQSSGLYSLSSVVTVPSSSLGTQTYICNVNHKPSNTKVDKRVEPKSCPPCGGGGSDIQMTQSPSSLSASVGDRVTITCRASENIYSYLAWYQQKPGKAPKLLIYNAKTLAEGVPSRFSGSGSGTDFTLTISSLQPEDFATYYCQHHYGTPRTFGGGTKVEIKGGGGSGGGGSGGGGSGGGGSQVQLVQSGAEVKKPGASVKVSCKASGYTFTSYWMNWVRQAPGQGLEWMGRIDPYDSETHYAQKLQGRVTMTTDTSTSTAYMELRSLRSDDTAVYYCARGGYDFDVGTLYWFFDVWGQGTTVTVSSGGSGGSPLGLAGLSGRSDNHGGGGSGGGGSGGGGSGGGGSGGGGSGGGGSGGSGGSAFKHEIKDSDNAELNSAVLQVNRLKSAQSG

SEQ ID NO: 240 - protein, 1191 aa, Artificial Sequence
  source: /note="Description of Artificial Sequence: Synthetic CD3cap137-ALB-MC2-h1F3.5Fd- NKG2A(L-H)-MC2-32GS-Acap9 sequence"
QDGNEEMGGITQTPYKVSISGTTVILTGGGSGGGSGGGSEVAHRFKDLGEENFKALVLIAFAQYLQQCPFEDHVKLVNEVTEFAKTCVADESAENCDKSLHTLFGDKLCTVATLRETYGEMADCCAKQEPERNECFLQHKDDNPNLPRLVRPEVDVMCTAFHDNEETFLKKYLYEIARRHPYFYAPELLFFAKRYKAAFTECCQAADKAACLLPKLDELRDEGKASSAKQRLKCASLQKFGERAFKAWAVARLSQRFPKAEFAEVSKLVTDLTKVHTECCHGDLLECADDRADLAKYICENQDSISSKLKECCEKPLLEKSHCIAEVENDEMPADLPSLAADFVESKDVCKNYAEAKDVFLGMFLYEYARRHPDYSVVLLLRLAKTYETTLEKCCAAADPHECYAKVFDEFKPLVEEPQNLIKQNCELFEQLGEYKFQNALLVRYTKKVPQVSTPTLVEVSRNLGKVGSKCCKHPEAKRMPCAEDYLSVVLNQLCVLHEKTPVSDRVTKCCTESLVNRRPCFSALEVDETYVPKEFNAETFTFHADICTLSEKERQIKKQTALVELVKHKPKATKEQLKAVMDDFAAFVEKCCKADDKETCFAEEGKKLVAASQAAGGSGGSPLGLAGLSGRSDNHGGSGGSEVQLVESGGGLVQPGGSLRLSCAASGFTFNTYAMNWVRQAPGKGLEWVARIRSKYNNYATYYADSVKDRFTISRDDSKNTLYLQMNSLRAEDTAVYYCVRHGNFGNSYVSWFAYWGQGTMVTVSSASTKGPSVFPLAPSSKSTSGGTAALGCLVKDYFPEPVTVSWNSGALTSGVHTFPAVLQSSGLYSLSSVVTVPSSSLGTQTYICNVNHKPSNTKVDKRVEPKSCPPCGGGGSDIQMTQSPSSLSASVGDRVTITCRASENIYSYLAWYQQKPGKAPKLLIYNAKTLAEGVPSRFSGSGSGTDFTLTISSLQPEDFATYYCQHHYGTPRTFGGGTKVEIKGGGGSGGGGSGGGGSGGGGSQVQLVQSGAEVKKPGASVKVSCKASGYTFTSYWMNWVRQAPGQGLEWMGRIDPYDSETHYAQKLQGRVTMTTDTSTSTAYMELRSLRSDDTAVYYCARGGYDFDVGTLYWFFDVWGQGTTVTVSSGGSGGSPLGLAGLSGRSDNHGGGGSGGGGSGGGGSGGGGSGGSGGSARHCGHSPEEWITYS

SEQ ID NO: 241 - protein, 1218 aa, Artificial Sequence
  source: /note="Description of Artificial Sequence: Synthetic CD3cap137-ALB-NC-h1F3.5Fd- NKG2A(L-H)-NC-32GS-Acap3.1 sequence"
QDGNEEMGGITQTPYKVSISGTTVILTGGGSGGGSGGGSEVAHRFKDLGEENFKALVLIAFAQYLQQCPFEDHVKLVNEVTEFAKTCVADESAENCDKSLHTLFGDKLCTVATLRETYGEMADCCAKQEPERNECFLQHKDDNPNLPRLVRPEVDVMCTAFHDNEETFLKKYLYEIARRHPYFYAPELLFFAKRYKAAFTECCQAADKAACLLPKLDELRDEGKASSAKQRLKCASLQKFGERAFKAWAVARLSQRFPKAEFAEVSKLVTDLTKVHTECCHGDLLECADDRADLAKYICENQDSISSKLKECCEKPLLEKSHCIAEVENDEMPADLPSLAADFVESKDVCKNYAEAKDVFLGMFLYEYARRHPDYSVVLLLRLAKTYETTLEKCCAAADPHECYAKVFDEFKPLVEEPQNLIKQNCELFEQLGEYKFQNALLVRYTKKVPQVSTPTLVEVSRNLGKVGSKCCKHPEAKRMPCAEDYLSVVLNQLCVLHEKTPVSDRVTKCCTESLVNRRPCFSALEVDETYVPKEFNAETFTFHADICTLSEKERQIKKQTALVELVKHKPKATKEQLKAVMDDFAAFVEKCCKADDKETCFAEEGKKLVAASQAAGGSGGSGGSGGSGGSGGSGGSGGSGGSEVQLVESGGGLVQPGGSLRLSCAASGFTFNTYAMNWVRQAPGKGLEWVARIRSKYNNYATYYADSVKDRFTISRDDSKNTLYLQMNSLRAEDTAVYYCVRHGNFGNSYVSWFAYWGQGTMVTVSSASTKGPSVFPLAPSSKSTSGGTAALGCLVKDYFPEPVTVSWNSGALTSGVHTFPAVLQSSGLYSLSSVVTVPSSSLGTQTYICNVNHKPSNTKVDKRVEPKSCPPCGGGGSDIQMTQSPSSLSASVGDRVTITCRASENIYSYLAWYQQKPGKAPKLLIYNAKTLAEGVPSRFSGSGSGTDFTLTISSLQPEDFATYYCQHHYGTPRTFGGGTKVEIKGGGGSGGGGSGGGGSGGGGSQVQLVQSGAEVKKPGASVKVSCKASGYTFTSYWMNWVRQAPGQGLEWMGRIDPYDSETHYAQKLQGRVTMTTDTSTSTAYMELRSLRSDDTAVYYCARGGYDFDVGTLYWFFDVWGQGTTVTVSSGGSGGSGGSGGSGGSGGSGGSGGGGSGGGGSGGGGSGGGGSGGSGGSLSIDNEEEMKFLSIISPSSWIGVFNSAVLQVNRLKSAQSG

SEQ ID NO: 242 - protein, 1228 aa, Artificial Sequence
  source: /note="Description of Artificial Sequence: Synthetic CD3cap137-ALB-NC-h1F3.5Fd- NKG2A(L-H)-NC-42GS-Acap3.1 sequence"
QDGNEEMGGITQTPYKVSISGTTVILTGGGSGGGSGGGSEVAHRFKDLGEENFKALVLIAFAQYLQQCPFEDHVKLVNEVTEFAKTCVADESAENCDKSLHTLFGDKLCTVATLRETYGEMADCCAKQEPERNECFLQHKDDNPNLPRLVRPEVDVMCTAFHDNEETFLKKYLYEIARRHPYFYAPELLFFAKRYKAAFTECCQAADKAACLLPKLDELRDEGKASSAKQRLKCASLQKFGERAFKAWAVARLSQRFPKAEFAEVSKLVTDLTKVHTECCHGDLLECADDRADLAKYICENQDSISSKLKECCEKPLLEKSHCIAEVENDEMPADLPSLAADFVESKDVCKNYAEAKDVFLGMFLYEYARRHPDYSVVLLLRLAKTYETTLEKCCAAADPHECYAKVFDEFKPLVEEPQNLIKQNCELFEQLGEYKFQNALLVRYTKKVPQVSTPTLVEVSRNLGKVGSKCCKHPEAKRMPCAEDYLSVVLNQLCVLHEKTPVSDRVTKCCTESLVNRRPCFSALEVDETYVPKEFNAETFTFHADICTLSEKERQIKKQTALVELVKHKPKATKEQLKAVMDDFAAFVEKCCKADDKETCFAEEGKKLVAASQAAGGSGGSGGSGGSGGSGGSGGSGGSGGSEVQLVESGGGLVQPGGSLRLSCAASGFTFNTYAMNWVRQAPGKGLEWVARIRSKYNNYATYYADSVKDRFTISRDDSKNTLYLQMNSLRAEDTAVYYCVRHGNFGNSYVSWFAYWGQGTMVTVSSASTKGPSVFPLAPSSKSTSGGTAALGCLVKDYFPEPVTVSWNSGALTSGVHTFPAVLQSSGLYSLSSVVTVPSSSLGTQTYICNVNHKPSNTKVDKRVEPKSCPPCGGGGSDIQMTQSPSSLSASVGDRVTITCRASENIYSYLAWYQQKPGKAPKLLIYNAKTLAEGVPSRFSGSGSGTDFTLTISSLQPEDFATYYCQHHYGTPRTFGGGTKVEIKGGGGSGGGGSGGGGSGGGGSQVQLVQSGAEVKKPGASVKVSCKASGYTFTSYWMNWVRQAPGQGLEWMGRIDPYDSETHYAQKLQGRVTMTTDTSTSTAYMELRSLRSDDTAVYYCARGGYDFDVGTLYWFFDVWGQGTTVTVSSGGSGGSGGSGGSGGSGGSGGSGGGGSGGGGSGGGGSGGGGSGGGGSGGGGSGGSGGSLSIDNEEEMKFLSIISPSSWIGVFNSAVLQVNRLKSAQSG

SEQ ID NO: 243 - protein, 1208 aa, Artificial Sequence
  source: /note="Description of Artificial Sequence: Synthetic CD3cap137-ALB-NC-h1F3.5Fd- NKG2A(L-H)-NC-32GS-Acap4.1 sequence"
QDGNEEMGGITQTPYKVSISGTTVILTGGGSGGGSGGGSEVAHRFKDLGEENFKALVLIAFAQYLQQCPFEDHVKLVNEVTEFAKTCVADESAENCDKSLHTLFGDKLCTVATLRETYGEMADCCAKQEPERNECFLQHKDDNPNLPRLVRPEVDVMCTAFHDNEETFLKKYLYEIARRHPYFYAPELLFFAKRYKAAFTECCQAADKAACLLPKLDELRDEGKASSAKQRLKCASLQKFGERAFKAWAVARLSQRFPKAEFAEVSKLVTDLTKVHTECCHGDLLECADDRADLAKYICENQDSISSKLKECCEKPLLEKSHCIAEVENDEMPADLPSLAADFVESKDVCKNYAEAKDVFLGMFLYEYARRHPDYSVVLLLRLAKTYETTLEKCCAAADPHECYAKVFDEFKPLVEEPQNLIKQNCELFEQLGEYKFQNALLVRYTKKVPQVSTPTLVEVSRNLGKVGSKCCKHPEAKRMPCAEDYLSVVLNQLCVLHEKTPVSDRVTKCCTESLVNRRPCFSALEVDETYVPKEFNAETFTFHADICTLSEKERQIKKQTALVELVKHKPKATKEQLKAVMDDFAAFVEKCCKADDKETCFAEEGKKLVAASQAAGGSGGSGGSGGSGGSGGSGGSGGSGGSEVQLVESGGGLVQPGGSLRLSCAASGFTFNTYAMNWVRQAPGKGLEWVARIRSKYNNYATYYADSVKDRFTISRDDSKNTLYLQMNSLRAEDTAVYYCVRHGNFGNSYVSWFAYWGQGTMVTVSSASTKGPSVFPLAPSSKSTSGGTAALGCLVKDYFPEPVTVSWNSGALTSGVHTFPAVLQSSGLYSLSSVVTVPSSSLGTQTYICNVNHKPSNTKVDKRVEPKSCPPCGGGGSDIQMTQSPSSLSASVGDRVTITCRASENIYSYLAWYQQKPGKAPKLLIYNAKTLAEGVPSRFSGSGSGTDFTLTISSLQPEDFATYYCQHHYGTPRTFGGGTKVEIKGGGGSGGGGSGGGGSGGGGSQVQLVQSGAEVKKPGASVKVSCKASGYTFTSYWMNWVRQAPGQGLEWMGRIDPYDSETHYAQKLQGRVTMTTDTSTSTAYMELRSLRSDDTAVYYCARGGYDFDVGTLYWFFDVWGQGTTVTVSSGGSGGSGGSGGSGGSGGSGGSGGGGSGGGGSGGGGSGGGGSGGSGGSAFKHEIKDSDNAELNSAVLQVNRLKSAQSG

SEQ ID NO: 244 - protein, 1218 aa, Artificial Sequence
  source: /note="Description of Artificial Sequence: Synthetic CD3cap137-ALB-NC-h1F3.5Fd- NKG2A(L-H)-NC-42GS-Acap4.1 sequence"
QDGNEEMGGITQTPYKVSISGTTVILTGGGSGGGSGGGSEVAHRFKDLGEENFKALVLIAFAQYLQQCPFEDHVKLVNEVTEFAKTCVADESAENCDKSLHTLFGDKLCTVATLRETYGEMADCCAKQEPERNECFLQHKDDNPNLPRLVRPEVDVMCTAFHDNEETFLKKYLYEIARRHPYFYAPELLFFAKRYKAAFTECCQAADKAACLLPKLDELRDEGKASSAKQRLKCASLQKFGERAFKAWAVARLSQRFPKAEFAEVSKLVTDLTKVHTECCHGDLLECADDRADLAKYICENQDSISSKLKECCEKPLLEKSHCIAEVENDEMPADLPSLAADFVESKDVCKNYAEAKDVFLGMFLYEYARRHPDYSVVLLLRLAKTYETTLEKCCAAADPHECYAKVFDEFKPLVEEPQNLIKQNCELFEQLGEYKFQNALLVRYTKKVPQVSTPTLVEVSRNLGKVGSKCCKHPEAKRMPCAEDYLSVVLNQLCVLHEKTPVSDRVTKCCTESLVNRRPCFSALEVDETYVPKEFNAETFTFHADICTLSEKERQIKKQTALVELVKHKPKATKEQLKAVMDDFAAFVEKCCKADDKETCFAEEGKKLVAASQAAGGSGGSGGSGGSGGSGGSGGSGGSGGSEVQLVESGGGLVQPGGSLRLSCAASGFTFNTYAMNWVRQAPGKGLEWVARIRSKYNNYATYYADSVKDRFTISRDDSKNTLYLQMNSLRAEDTAVYYCVRHGNFGNSYVSWFAYWGQGTMVTVSSASTKGPSVFPLAPSSKSTSGGTAALGCLVKDYFPEPVTVSWNSGALTSGVHTFPAVLQSSGLYSLSSVVTVPSSSLGTQTYICNVNHKPSNTKVDKRVEPKSCPPCGGGGSDIQMTQSPSSLSASVGDRVTITCRASENIYSYLAWYQQKPGKAPKLLIYNAKTLAEGVPSRFSGSGSGTDFTLTISSLQPEDFATYYCQHHYGTPRTFGGGTKVEIKGGGGSGGGGSGGGGSGGGGSQVQLVQSGAEVKKPGASVKVSCKASGYTFTSYWMNWVRQAPGQGLEWMGRIDPYDSETHYAQKLQGRVTMTTDTSTSTAYMELRSLRSDDTAVYYCARGGYDFDVGTLYWFFDVWGQGTTVTVSSGGSGGSGGSGGSGGSGGSGGSGGGGSGGGGSGGGGSGGGGSGGGGSGGGGSGGSGGSAFKHEIKDSDNAELNSAVLQVNRLKSAQSG

SEQ ID NO: 245 - protein, 1193 aa, Artificial Sequence
  source: /note="Description of Artificial Sequence: Synthetic CD3cap137-ALB-NC-h1F3.5Fd- NKG2A(L-H)-NC-32GS-Acap9 sequence"
QDGNEEMGGITQTPYKVSISGTTVILTGGGSGGGSGGGSEVAHRFKDLGEENFKALVLIAFAQYLQQCPFEDHVKLVNEVTEFAKTCVADESAENCDKSLHTLFGDKLCTVATLRETYGEMADCCAKQEPERNECFLQHKDDNPNLPRLVRPEVDVMCTAFHDNEETFLKKYLYEIARRHPYFYAPELLFFAKRYKAAFTECCQAADKAACLLPKLDELRDEGKASSAKQRLKCASLQKFGERAFKAWAVARLSQRFPKAEFAEVSKLVTDLTKVHTECCHGDLLECADDRADLAKYICENQDSISSKLKECCEKPLLEKSHCIAEVENDEMPADLPSLAADFVESKDVCKNYAEAKDVFLGMFLYEYARRHPDYSVVLLLRLAKTYETTLEKCCAAADPHECYAKVFDEFKPLVEEPQNLIKQNCELFEQLGEYKFQNALLVRYTKKVPQVSTPTLVEVSRNLGKVGSKCCKHPEAKRMPCAEDYLSVVLNQLCVLHEKTPVSDRVTKCCTESLVNRRPCFSALEVDETYVPKEFNAETFTFHADICTLSEKERQIKKQTALVELVKHKPKATKEQLKAVMDDFAAFVEKCCKADDKETCFAEEGKKLVAASQAAGGSGGSGGSGGSGGSGGSGGSGGSGGSEVQLVESGGGLVQPGGSLRLSCAASGFTFNTYAMNWVRQAPGKGLEWVARIRSKYNNYATYYADSVKDRFTISRDDSKNTLYLQMNSLRAEDTAVYYCVRHGNFGNSYVSWFAYWGQGTMVTVSSASTKGPSVFPLAPSSKSTSGGTAALGCLVKDYFPEPVTVSWNSGALTSGVHTFPAVLQSSGLYSLSSVVTVPSSSLGTQTYICNVNHKPSNTKVDKRVEPKSCPPCGGGGSDIQMTQSPSSLSASVGDRVTITCRASENIYSYLAWYQQKPGKAPKLLIYNAKTLAEGVPSRFSGSGSGTDFTLTISSLQPEDFATYYCQHHYGTPRTFGGGTKVEIKGGGGSGGGGSGGGGSGGGGSQVQLVQSGAEVKKPGASVKVSCKASGYTFTSYWMNWVRQAPGQGLEWMGRIDPYDSETHYAQKLQGRVTMTTDTSTSTAYMELRSLRSDDTAVYYCARGGYDFDVGTLYWFFDVWGQGTTVTVSSGGSGGSGGSGGSGGSGGSGGSGGGGSGGGGSGGGGSGGGGSGGSGGSARHCGHSPEEWITYS

SEQ ID NO: 246 - protein, 741 aa, Artificial Sequence
  source: /note="Description of Artificial Sequence: Synthetic h1F3.5Fd- bi-NKG2A sequence"
GGSGGSEVQLVESGGGLVQPGGSLRLSCAASGFTFNTYAMNWVRQAPGKGLEWVARIRSKYNNYATYYADSVKDRFTISRDDSKNTLYLQMNSLRAEDTAVYYCVRHGNFGNSYVSWFAYWGQGTMVTVSSASTKGPSVFPLAPSSKSTSGGTAALGCLVKDYFPEPVTVSWNSGALTSGVHTFPAVLQSSGLYSLSSVVTVPSSSLGTQTYICNVNHKPSNTKVDKRVEPKSCPPCGGGGSDIQMTQSPSSLSASVGDRVTITCRASENIYSYLAWYQQKPGKAPKLLIYNAKTLAEGVPSRFSGSGSGTDFTLTISSLQPEDFATYYCQHHYGTPRTFGGGTKVEIKGGGGSGGGGSGGGGSQVQLVQSGAEVKKPGASVKVSCKASGYTFTSYWMNWVRQAPGQGLEWMGRIDPYDSETHYAQKLQGRVTMTTDTSTSTAYMELRSLRSDDTAVYYCARGGYDFDVGTLYWFFDVWGQGTTVTVSSGGGGSDIQMTQSPSSLSASVGDRVTITCRASENIYSYLAWYQQKPGKAPKLLIYNAKTLAEGVPSRFSGSGSGTDFTLTISSLQPEDFATYYCQHHYGTPRTFGGGTKVEIKGGGGSGGGGSGGGGSQVQLVQSGAEVKKPGASVKVSCKASGYTFTSYWMNWVRQAPGQGLEWMGRIDPYDSETHYAQKLQGRVTMTTDTSTSTAYMELRSLRSDDTAVYYCARGGYDFDVGTLYWFFDVWGQGTTVTVSS

SEQ ID NO: 247 - protein, 741 aa, Artificial Sequence
  source: /note="Description of Artificial Sequence: Synthetic h1F3.5FdMut3-bi-NKG2A sequence"
GGSGGSEVQLVESGGGLVQPGGSLRLSCAASGFTFNTYAMNWVRQAPGKGLEWVARIGSGGNGYATYYADSVKDRFTISRDDSKNTLYLQMNSLRAEDTAVYYCVRHGNFGASARSWFAYWGQGTMVTVSSASTKGPSVFPLAPSSKSTSGGTAALGCLVKDYFPEPVTVSWNSGALTSGVHTFPAVLQSSGLYSLSSVVTVPSSSLGTQTYICNVNHKPSNTKVDKRVEPKSCPPCGGGGSDIQMTQSPSSLSASVGDRVTITCRASENIYSYLAWYQQKPGKAPKLLIYNAKTLAEGVPSRFSGSGSGTDFTLTISSLQPEDFATYYCQHHYGTPRTFGGGTKVEIKGGGGSGGGGSGGGGSQVQLVQSGAEVKKPGASVKVSCKASGYTFTSYWMNWVRQAPGQGLEWMGRIDPYDSETHYAQKLQGRVTMTTDTSTSTAYMELRSLRSDDTAVYYCARGGYDFDVGTLYWFFDVWGQGTTVTVSSGGGGSDIQMTQSPSSLSASVGDRVTITCRASENIYSYLAWYQQKPGKAPKLLIYNAKTLAEGVPSRFSGSGSGTDFTLTISSLQPEDFATYYCQHHYGTPRTFGGGTKVEIKGGGGSGGGGSGGGGSQVQLVQSGAEVKKPGASVKVSCKASGYTFTSYWMNWVRQAPGQGLEWMGRIDPYDSETHYAQKLQGRVTMTTDTSTSTAYMELRSLRSDDTAVYYCARGGYDFDVGTLYWFFDVWGQGTTVTVSS

SEQ ID NO: 248 - protein, 1377 aa, Artificial Sequence
  source: /note="Description of Artificial Sequence: Synthetic CD3cap137-ALB-MC2-hF3.5Fd-bi-NKG2A sequence"
QDGNEEMGGITQTPYKVSISGTTVILTGGGSGGGSGGGSEVAHRFKDLGEENFKALVLIAFAQYLQQCPFEDHVKLVNEVTEFAKTCVADESAENCDKSLHTLFGDKLCTVATLRETYGEMADCCAKQEPERNECFLQHKDDNPNLPRLVRPEVDVMCTAFHDNEETFLKKYLYEIARRHPYFYAPELLFFAKRYKAAFTECCQAADKAACLLPKLDELRDEGKASSAKQRLKCASLQKFGERAFKAWAVARLSQRFPKAEFAEVSKLVTDLTKVHTECCHGDLLECADDRADLAKYICENQDSISSKLKECCEKPLLEKSHCIAEVENDEMPADLPSLAADFVESKDVCKNYAEAKDVFLGMFLYEYARRHPDYSVVLLLRLAKTYETTLEKCCAAADPHECYAKVFDEFKPLVEEPQNLIKQNCELFEQLGEYKFQNALLVRYTKKVPQVSTPTLVEVSRNLGKVGSKCCKHPEAKRMPCAEDYLSVVLNQLCVLHEKTPVSDRVTKCCTESLVNRRPCFSALEVDETYVPKEFNAETFTFHADICTLSEKERQIKKQTALVELVKHKPKATKEQLKAVMDDFAAFVEKCCKADDKETCFAEEGKKLVAASQAAGGSGGSPLGLAGLSGRSDNHGGSGGSEVQLVESGGGLVQPGGSLRLSCAASGFTFNTYAMNWVRQAPGKGLEWVARIRSKYNNYATYYADSVKDRFTISRDDSKNTLYLQMNSLRAEDTAVYYCVRHGNFGNSYVSWFAYWGQGTMVTVSSASTKGPSVFPLAPSSKSTSGGTAALGCLVKDYFPEPVTVSWNSGALTSGVHTFPAVLQSSGLYSLSSVVTVPSSSLGTQTYICNVNHKPSNTKVDKRVEPKSCPPCGGGGSDIQMTQSPSSLSASVGDRVTITCRASENIYSYLAWYQQKPGKAPKLLIYNAKTLAEGVPSRFSGSGSGTDFTLTISSLQPEDFATYYCQHHYGTPRTFGGGTKVEIKGGGGSGGGGSGGGGSQVQLVQSGAEVKKPGASVKVSCKASGYTFTSYWMNWVRQAPGQGLEWMGRIDPYDSETHYAQKLQGRVTMTTDTSTSTAYMELRSLRSDDTAVYYCARGGYDFDVGTLYWFFDVWGQGTTVTVSSGGGGSDIQMTQSPSSLSASVGDRVTITCRASENIYSYLAWYQQKPGKAPKLLIYNAKTLAEGVPSRFSGSGSGTDFTLTISSLQPEDFATYYCQHHYGTPRTFGGGTKVEIKGGGGSGGGGSGGGGSQVQLVQSGAEVKKPGASVKVSCKASGYTFTSYWMNWVRQAPGQGLEWMGRIDPYDSETHYAQKLQGRVTMTTDTSTSTAYMELRSLRSDDTAVYYCARGGYDFDVGTLYWFFDVWGQGTTVTVSS

SEQ ID NO: 249 - protein, 1378 aa, Artificial Sequence
  source: /note="Description of Artificial Sequence: Synthetic CD3cap137-ALB-NC-hF3.5Fd-bi-NKG2A sequence"
QDGNEEMGGITQTPYKVSISGTTVILTGGGSGGGSGGGSEVAHRFKDLGEENFKALVLIAFAQYLQQCPFEDHVKLVNEVTEFAKTCVADESAENCDKSLHTLFGDKLCTVATLRETYGEMADCCAKQEPERNECFLQHKDDNPNLPRLVRPEVDVMCTAFHDNEETFLKKYLYEIARRHPYFYAPELLFFAKRYKAAFTECCQAADKAACLLPKLDELRDEGKASSAKQRLKCASLQKFGERAFKAWAVARLSQRFPKAEFAEVSKLVTDLTKVHTECCHGDLLECADDRADLAKYICENQDSISSKLKECCEKPLLEKSHCIAEVENDEMPADLPSLAADFVESKDVCKNYAEAKDVFLGMFLYEYARRHPDYSVVLLLRLAKTYETTLEKCCAAADPHECYAKVFDEFKPLVEEPQNLIKQNCELFEQLGEYKFQNALLVRYTKKVPQVSTPTLVEVSRNLGKVGSKCCKHPEAKRMPCAEDYLSVVLNQLCVLHEKTPVSDRVTKCCTESLVNRRPCFSALEVDETYVPKEFNAETFTFHADICTLSEKERQIKKQTALVELVKHKPKATKEQLKAVMDDFAAFVEKCCKADDKETCFAEEGKKLVAASQAAGGSGGSGGSGGSGGSGGSGGSGGSGGSEVQLVESGGGLVQPGGSLRLSCAASGFTFNTYAMNWVRQAPGKGLEWVARIRSKYNNYATYYADSVKDRFTISRDDSKNTLYLQMNSLRAEDTAVYYCVRHGNFGNSYVSWFAYWGQGTMVTVSSASTKGPSVFPLAPSSKSTSGGTAALGCLVKDYFPEPVTVSWNSGALTSGVHTFPAVLQSSGLYSLSSVVTVPSSSLGTQTYICNVNHKPSNTKVDKRVEPKSCPPCGGGGSDIQMTQSPSSLSASVGDRVTITCRASENIYSYLAWYQQKPGKAPKLLIYNAKTLAEGVPSRFSGSGSGTDFTLTISSLQPEDFATYYCQHHYGTPRTFGGGTKVEIKGGGGSGGGGSGGGGSQVQLVQSGAEVKKPGASVKVSCKASGYTFTSYWMNWVRQAPGQGLEWMGRIDPYDSETHYAQKLQGRVTMTTDTSTSTAYMELRSLRSDDTAVYYCARGGYDFDVGTLYWFFDVWGQGTTVTVSSGGGGSDIQMTQSPSSLSASVGDRVTITCRASENIYSYLAWYQQKPGKAPKLLIYNAKTLAEGVPSRFSGSGSGTDFTLTISSLQPEDFATYYCQHHYGTPRTFGGGTKVEIKGGGGSGGGGSGGGGSQVQLVQSGAEVKKPGASVKVSCKASGYTFTSYWMNWVRQAPGQGLEWMGRIDPYDSETHYAQKLQGRVTMTTDTSTSTAYMELRSLRSDDTAVYYCARGGYDFDVGTLYWFFDVWGQGTTVTVSS

SEQ ID NO: 250 - protein, 1128 aa, Artificial Sequence
  source: /note="Description of Artificial Sequence: Synthetic CD3cap137-ALB-MC2-h1F3.5Fd- 5T4_IM53(L-H) sequence"
QDGNEEMGGITQTPYKVSISGTTVILTGGGSGGGSGGGSEVAHRFKDLGEENFKALVLIAFAQYLQQCPFEDHVKLVNEVTEFAKTCVADESAENCDKSLHTLFGDKLCTVATLRETYGEMADCCAKQEPERNECFLQHKDDNPNLPRLVRPEVDVMCTAFHDNEETFLKKYLYEIARRHPYFYAPELLFFAKRYKAAFTECCQAADKAACLLPKLDELRDEGKASSAKQRLKCASLQKFGERAFKAWAVARLSQRFPKAEFAEVSKLVTDLTKVHTECCHGDLLECADDRADLAKYICENQDSISSKLKECCEKPLLEKSHCIAEVENDEMPADLPSLAADFVESKDVCKNYAEAKDVFLGMFLYEYARRHPDYSVVLLLRLAKTYETTLEKCCAAADPHECYAKVFDEFKPLVEEPQNLIKQNCELFEQLGEYKFQNALLVRYTKKVPQVSTPTLVEVSRNLGKVGSKCCKHPEAKRMPCAEDYLSVVLNQLCVLHEKTPVSDRVTKCCTESLVNRRPCFSALEVDETYVPKEFNAETFTFHADICTLSEKERQIKKQTALVELVKHKPKATKEQLKAVMDDFAAFVEKCCKADDKETCFAEEGKKLVAASQAAGGSGGSPLGLAGLSGRSDNHGGSGGSEVQLVESGGGLVQPGGSLRLSCAASGFTFNTYAMNWVRQAPGKGLEWVARIRSKYNNYATYYADSVKDRFTISRDDSKNTLYLQMNSLRAEDTAVYYCVRHGNFGNSYVSWFAYWGQGTMVTVSSASTKGPSVFPLAPSSKSTSGGTAALGCLVKDYFPEPVTVSWNSGALTSGVHTFPAVLQSSGLYSLSSVVTVPSSSLGTQTYICNVNHKPSNTKVDKRVEPKSCPPCGGGGSENVLTQSPATLSLSPGERATLSCSASSSVNYMHWYQQKPGQSPRLLIYDTSKLASGIPARFSGSGSGTDYTLTISSLEPEDFAVYFCFQGSGYPYTFGGGTKVEIKGGGGSGGGGSGGGGSGGGGSQVQLVQSGAEVKKPGASVKVSCKASGYTFTDYYMNWVRQAPGRGLEWMGVFNPYNGDTRYTQKFKDRVTMTIDKSISTAYMELSRLRSDDTAVYYCARLRLLYDTSEYYVMDYWGQGTTVTVSS

SEQ ID NO: 251 - protein, 1129 aa, Artificial Sequence
  source: /note="Description of Artificial Sequence: Synthetic HC CD3cap137-ALB-NC-hF3.5Fd-5T4_IM53 sequence"
QDGNEEMGGITQTPYKVSISGTTVILTGGGSGGGSGGGSEVAHRFKDLGEENFKALVLIAFAQYLQQCPFEDHVKLVNEVTEFAKTCVADESAENCDKSLHTLFGDKLCTVATLRETYGEMADCCAKQEPERNECFLQHKDDNPNLPRLVRPEVDVMCTAFHDNEETFLKKYLYEIARRHPYFYAPELLFFAKRYKAAFTECCQAADKAACLLPKLDELRDEGKASSAKQRLKCASLQKFGERAFKAWAVARLSQRFPKAEFAEVSKLVTDLTKVHTECCHGDLLECADDRADLAKYICENQDSISSKLKECCEKPLLEKSHCIAEVENDEMPADLPSLAADFVESKDVCKNYAEAKDVFLGMFLYEYARRHPDYSVVLLLRLAKTYETTLEKCCAAADPHECYAKVFDEFKPLVEEPQNLIKQNCELFEQLGEYKFQNALLVRYTKKVPQVSTPTLVEVSRNLGKVGSKCCKHPEAKRMPCAEDYLSVVLNQLCVLHEKTPVSDRVTKCCTESLVNRRPCFSALEVDETYVPKEFNAETFTFHADICTLSEKERQIKKQTALVELVKHKPKATKEQLKAVMDDFAAFVEKCCKADDKETCFAEEGKKLVAASQAAGGSGGSGGSGGSGGSGGSGGSGGSGGSEVQLVESGGGLVQPGGSLRLSCAASGFTFNTYAMNWVRQAPGKGLEWVARIRSKYNNYATYYADSVKDRFTISRDDSKNTLYLQMNSLRAEDTAVYYCVRHGNFGNSYVSWFAYWGQGTMVTVSSASTKGPSVFPLAPSSKSTSGGTAALGCLVKDYFPEPVTVSWNSGALTSGVHTFPAVLQSSGLYSLSSVVTVPSSSLGTQTYICNVNHKPSNTKVDKRVEPKSCPPCGGGGSENVLTQSPATLSLSPGERATLSCSASSSVNYMHWYQQKPGQSPRLLIYDTSKLASGIPARFSGSGSGTDYTLTISSLEPEDFAVYFCFQGSGYPYTFGGGTKVEIKGGGGSGGGGSGGGGSGGGGSQVQLVQSGAEVKKPGASVKVSCKASGYTFTDYYMNWVRQAPGRGLEWMGVFNPYNGDTRYTQKFKDRVTMTIDKSISTAYMELSRLRSDDTAVYYCARLRLLYDTSEYYVMDYWGQGTTVTVSS

SEQ ID NO: 252 - protein, 483 aa, Artificial Sequence
  source: /note="Description of Artificial Sequence: Synthetic HC h1F3.5Fd-CD16ScFv(L-H) sequence"
GGSGGSEVQLVESGGGLVQPGGSLRLSCAASGFTFNTYAMNWVRQAPGKGLEWVARIRSKYNNYATYYADSVKDRFTISRDDSKNTLYLQMNSLRAEDTAVYYCVRHGNFGNSYVSWFAYWGQGTMVTVSSASTKGPSVFPLAPSSKSTSGGTAALGCLVKDYFPEPVTVSWNSGALTSGVHTFPAVLQSSGLYSLSSVVTVPSSSLGTQTYICNVNHKPSNTKVDKRVEPKSCPPCGGGGSSYVLTQPSSVSVAPGQTATISCGGHNIGSKNVHWYQQRPGQSPVLVIYQDNKRPSGIPERFSGSNSGNTATLTISGTQAMDEADYYCQVWDNYSVLFGGGTKLTVLGGGGSGGGGSGGGGSQVQLVQSGAEVKKPGESLKVSCKASGYTFTSYYMHWVRQAPGQGLEWMGIINPSGGSTSYAQKFQGRVTMTRDTSTSTVYMELSSLRSEDTAVYYCARGSAYYYDFADYWGQGTLVTVSS

SEQ ID NO: 253 - protein, 1119 aa, Artificial Sequence
  source: /note="Description of Artificial Sequence: Synthetic HC CD3cap137-ALB-MC2-hF3.5Fd-CD16 sequence"
QDGNEEMGGITQTPYKVSISGTTVILTGGGSGGGSGGGSEVAHRFKDLGEENFKALVLIAFAQYLQQCPFEDHVKLVNEVTEFAKTCVADESAENCDKSLHTLFGDKLCTVATLRETYGEMADCCAKQEPERNECFLQHKDDNPNLPRLVRPEVDVMCTAFHDNEETFLKKYLYEIARRHPYFYAPELLFFAKRYKAAFTECCQAADKAACLLPKLDELRDEGKASSAKQRLKCASLQKFGERAFKAWAVARLSQRFPKAEFAEVSKLVTDLTKVHTECCHGDLLECADDRADLAKYICENQDSISSKLKECCEKPLLEKSHCIAEVENDEMPADLPSLAADFVESKDVCKNYAEAKDVFLGMFLYEYARRHPDYSVVLLLRLAKTYETTLEKCCAAADPHECYAKVFDEFKPLVEEPQNLIKQNCELFEQLGEYKFQNALLVRYTKKVPQVSTPTLVEVSRNLGKVGSKCCKHPEAKRMPCAEDYLSVVLNQLCVLHEKTPVSDRVTKCCTESLVNRRPCFSALEVDETYVPKEFNAETFTFHADICTLSEKERQIKKQTALVELVKHKPKATKEQLKAVMDDFAAFVEKCCKADDKETCFAEEGKKLVAASQAAGGSGGSPLGLAGLSGRSDNHGGSGGSEVQLVESGGGLVQPGGSLRLSCAASGFTFNTYAMNWVRQAPGKGLEWVARIRSKYNNYATYYADSVKDRFTISRDDSKNTLYLQMNSLRAEDTAVYYCVRHGNFGNSYVSWFAYWGQGTMVTVSSASTKGPSVFPLAPSSKSTSGGTAALGCLVKDYFPEPVTVSWNSGALTSGVHTFPAVLQSSGLYSLSSVVTVPSSSLGTQTYICNVNHKPSNTKVDKRVEPKSCPPCGGGGSSYVLTQPSSVSVAPGQTATISCGGHNIGSKNVHWYQQRPGQSPVLVIYQDNKRPSGIPERFSGSNSGNTATLTISGTQAMDEADYYCQVWDNYSVLFGGGTKLTVLGGGGSGGGGSGGGGSQVQLVQSGAEVKKPGESLKVSCKASGYTFTSYYMHWVRQAPGQGLEWMGIINPSGGSTSYAQKFQGRVTMTRDTSTSTVYMELSSLRSEDTAVYYCARGSAYYYDFADYWGQGTLVTVSS

SEQ ID NO: 254 - protein, 483 aa, Artificial Sequence
  source: /note="Description of Artificial Sequence: Synthetic HC h1F3.5FdMut3-CD16_ScFv(L-H) sequence"
GGSGGSEVQLVESGGGLVQPGGSLRLSCAASGFTFNTYAMNWVRQAPGKGLEWVARIGSGGNGYATYYADSVKDRFTISRDDSKNTLYLQMNSLRAEDTAVYYCVRHGNFGASARSWFAYWGQGTMVTVSSASTKGPSVFPLAPSSKSTSGGTAALGCLVKDYFPEPVTVSWNSGALTSGVHTFPAVLQSSGLYSLSSVVTVPSSSLGTQTYICNVNHKPSNTKVDKRVEPKSCPPCGGGGSSYVLTQPSSVSVAPGQTATISCGGHNIGSKNVHWYQQRPGQSPVLVIYQDNKRPSGIPERFSGSNSGNTATLTISGTQAMDEADYYCQVWDNYSVLFGGGTKLTVLGGGGSGGGGSGGGGSQVQLVQSGAEVKKPGESLKVSCKASGYTFTSYYMHWVRQAPGQGLEWMGIINPSGGSTSYAQKFQGRVTMTRDTSTSTVYMELSSLRSEDTAVYYCARGSAYYYDFADYWGQGTLVTVSS

SEQ ID NO: 255 - protein, 1120 aa, Artificial Sequence
  source: /note="Description of Artificial Sequence: Synthetic HC CD3cap137-ALB-NC-hF3.5Fd-CD16 sequence"
QDGNEEMGGITQTPYKVSISGTTVILTGGGSGGGSGGGSEVAHRFKDLGEENFKALVLIAFAQYLQQCPFEDHVKLVNEVTEFAKTCVADESAENCDKSLHTLFGDKLCTVATLRETYGEMADCCAKQEPERNECFLQHKDDNPNLPRLVRPEVDVMCTAFHDNEETFLKKYLYEIARRHPYFYAPELLFFAKRYKAAFTECCQAADKAACLLPKLDELRDEGKASSAKQRLKCASLQKFGERAFKAWAVARLSQRFPKAEFAEVSKLVTDLTKVHTECCHGDLLECADDRADLAKYICENQDSISSKLKECCEKPLLEKSHCIAEVENDEMPADLPSLAADFVESKDVCKNYAEAKDVFLGMFLYEYARRHPDYSVVLLLRLAKTYETTLEKCCAAADPHECYAKVFDEFKPLVEEPQNLIKQNCELFEQLGEYKFQNALLVRYTKKVPQVSTPTLVEVSRNLGKVGSKCCKHPEAKRMPCAEDYLSVVLNQLCVLHEKTPVSDRVTKCCTESLVNRRPCFSALEVDETYVPKEFNAETFTFHADICTLSEKERQIKKQTALVELVKHKPKATKEQLKAVMDDFAAFVEKCCKADDKETCFAEEGKKLVAASQAAGGSGGSGGSGGSGGSGGSGGSGGSGGSEVQLVESGGGLVQPGGSLRLSCAASGFTFNTYAMNWVRQAPGKGLEWVARIRSKYNNYATYYADSVKDRFTISRDDSKNTLYLQMNSLRAEDTAVYYCVRHGNFGNSYVSWFAYWGQGTMVTVSSASTKGPSVFPLAPSSKSTSGGTAALGCLVKDYFPEPVTVSWNSGALTSGVHTFPAVLQSSGLYSLSSVVTVPSSSLGTQTYICNVNHKPSNTKVDKRVEPKSCPPCGGGGSSYVLTQPSSVSVAPGQTATISCGGHNIGSKNVHWYQQRPGQSPVLVIYQDNKRPSGIPERFSGSNSGNTATLTISGTQAMDEADYYCQVWDNYSVLFGGGTKLTVLGGGGSGGGGSGGGGSQVQLVQSGAEVKKPGESLKVSCKASGYTFTSYYMHWVRQAPGQGLEWMGIINPSGGSTSYAQKFQGRVTMTRDTSTSTVYMELSSLRSEDTAVYYCARGSAYYYDFADYWGQGTLVTVSS

SEQ ID NO: 256 - protein, 1122 aa, Artificial Sequence
  source: /note="Description of Artificial Sequence: Synthetic CD3cap137-ALB-MMP-hF3.5Fd-NKG2A sequence"
QDGNEEMGGITQTPYKVSISGTTVILTGGGSGGGSGGGSEVAHRFKDLGEENFKALVLIAFAQYLQQCPFEDHVKLVNEVTEFAKTCVADESAENCDKSLHTLFGDKLCTVATLRETYGEMADCCAKQEPERNECFLQHKDDNPNLPRLVRPEVDVMCTAFHDNEETFLKKYLYEIARRHPYFYAPELLFFAKRYKAAFTECCQAADKAACLLPKLDELRDEGKASSAKQRLKCASLQKFGERAFKAWAVARLSQRFPKAEFAEVSKLVTDLTKVHTECCHGDLLECADDRADLAKYICENQDSISSKLKECCEKPLLEKSHCIAEVENDEMPADLPSLAADFVESKDVCKNYAEAKDVFLGMFLYEYARRHPDYSVVLLLRLAKTYETTLEKCCAAADPHECYAKVFDEFKPLVEEPQNLIKQNCELFEQLGEYKFQNALLVRYTKKVPQVSTPTLVEVSRNLGKVGSKCCKHPEAKRMPCAEDYLSVVLNQLCVLHEKTPVSDRVTKCCTESLVNRRPCFSALEVDETYVPKEFNAETFTFHADICTLSEKERQIKKQTALVELVKHKPKATKEQLKAVMDDFAAFVEKCCKADDKETCFAEEGKKLVAASQAAGGSGGSPLGLAGGGSGGSEVQLVESGGGLVQPGGSLRLSCAASGFTFNTYAMNWVRQAPGKGLEWVARIRSKYNNYATYYADSVKDRFTISRDDSKNTLYLQMNSLRAEDTAVYYCVRHGNFGNSYVSWFAYWGQGTMVTVSSASTKGPSVFPLAPSSKSTSGGTAALGCLVKDYFPEPVTVSWNSGALTSGVHTFPAVLQSSGLYSLSSVVTVPSSSLGTQTYICNVNHKPSNTKVDKRVEPKSCPPCGGGGSDIQMTQSPSSLSASVGDRVTITCRASENIYSYLAWYQQKPGKAPKLLIYNAKTLAEGVPSRFSGSGSGTDFTLTISSLQPEDFATYYCQHHYGTPRTFGGGTKVEIKGGGGSGGGGSGGGGSGGGGSQVQLVQSGAEVKKPGASVKVSCKASGYTFTSYWMNWVRQAPGQGLEWMGRIDPYDSETHYAQKLQGRVTMTTDTSTSTAYMELRSLRSDDTAVYYCARGGYDFDVGTLYWFFDVWGQGTTVTVSS

SEQ ID NO: 257 - protein, 1134 aa, Artificial Sequence
  source: /note="Description of Artificial Sequence: Synthetic CD3cap137-ALB-MC2v2-hF3.5Fd-NKG2A sequence"
QDGNEEMGGITQTPYKVSISGTTVILTGGGSGGGSGGGSEVAHRFKDLGEENFKALVLIAFAQYLQQCPFEDHVKLVNEVTEFAKTCVADESAENCDKSLHTLFGDKLCTVATLRETYGEMADCCAKQEPERNECFLQHKDDNPNLPRLVRPEVDVMCTAFHDNEETFLKKYLYEIARRHPYFYAPELLFFAKRYKAAFTECCQAADKAACLLPKLDELRDEGKASSAKQRLKCASLQKFGERAFKAWAVARLSQRFPKAEFAEVSKLVTDLTKVHTECCHGDLLECADDRADLAKYICENQDSISSKLKECCEKPLLEKSHCIAEVENDEMPADLPSLAADFVESKDVCKNYAEAKDVFLGMFLYEYARRHPDYSVVLLLRLAKTYETTLEKCCAAADPHECYAKVFDEFKPLVEEPQNLIKQNCELFEQLGEYKFQNALLVRYTKKVPQVSTPTLVEVSRNLGKVGSKCCKHPEAKRMPCAEDYLSVVLNQLCVLHEKTPVSDRVTKCCTESLVNRRPCFSALEVDETYVPKEFNAETFTFHADICTLSEKERQIKKQTALVELVKHKPKATKEQLKAVMDDFAAFVEKCCKADDKETCFAEEGKKLVAASQAAGGSGGSPLGLAGGSGSLSGRSDNHGGSGGSEVQLVESGGGLVQPGGSLRLSCAASGFTFNTYAMNWVRQAPGKGLEWVARIRSKYNNYATYYADSVKDRFTISRDDSKNTLYLQMNSLRAEDTAVYYCVRHGNFGNSYVSWFAYWGQGTMVTVSSASTKGPSVFPLAPSSKSTSGGTAALGCLVKDYFPEPVTVSWNSGALTSGVHTFPAVLQSSGLYSLSSVVTVPSSSLGTQTYICNVNHKPSNTKVDKRVEPKSCPPCGGGGSDIQMTQSPSSLSASVGDRVTITCRASENIYSYLAWYQQKPGKAPKLLIYNAKTLAEGVPSRFSGSGSGTDFTLTISSLQPEDFATYYCQHHYGTPRTFGGGTKVEIKGGGGSGGGGSGGGGSGGGGSQVQLVQSGAEVKKPGASVKVSCKASGYTFTSYWMNWVRQAPGQGLEWMGRIDPYDSETHYAQKLQGRVTMTTDTSTSTAYMELRSLRSDDTAVYYCARGGYDFDVGTLYWFFDVWGQGTTVTVSS

SEQ ID NO: 258 - protein, 1136 aa, Artificial Sequence
  source: /note="Description of Artificial Sequence: Synthetic CD3cap137-ALB-MC2v3-hF3.5Fd-NKG2A sequence"
QDGNEEMGGITQTPYKVSISGTTVILTGGGSGGGSGGGSEVAHRFKDLGEENFKALVLIAFAQYLQQCPFEDHVKLVNEVTEFAKTCVADESAENCDKSLHTLFGDKLCTVATLRETYGEMADCCAKQEPERNECFLQHKDDNPNLPRLVRPEVDVMCTAFHDNEETFLKKYLYEIARRHPYFYAPELLFFAKRYKAAFTECCQAADKAACLLPKLDELRDEGKASSAKQRLKCASLQKFGERAFKAWAVARLSQRFPKAEFAEVSKLVTDLTKVHTECCHGDLLECADDRADLAKYICENQDSISSKLKECCEKPLLEKSHCIAEVENDEMPADLPSLAADFVESKDVCKNYAEAKDVFLGMFLYEYARRHPDYSVVLLLRLAKTYETTLEKCCAAADPHECYAKVFDEFKPLVEEPQNLIKQNCELFEQLGEYKFQNALLVRYTKKVPQVSTPTLVEVSRNLGKVGSKCCKHPEAKRMPCAEDYLSVVLNQLCVLHEKTPVSDRVTKCCTESLVNRRPCFSALEVDETYVPKEFNAETFTFHADICTLSEKERQIKKQTALVELVKHKPKATKEQLKAVMDDFAAFVEKCCKADDKETCFAEEGKKLVAASQAAGGSGGSPLGLAGGSGSGSLSGRSDNHGGSGGSEVQLVESGGGLVQPGGSLRLSCAASGFTFNTYAMNWVRQAPGKGLEWVARIRSKYNNYATYYADSVKDRFTISRDDSKNTLYLQMNSLRAEDTAVYYCVRHGNFGNSYVSWFAYWGQGTMVTVSSASTKGPSVFPLAPSSKSTSGGTAALGCLVKDYFPEPVTVSWNSGALTSGVHTFPAVLQSSGLYSLSSVVTVPSSSLGTQTYICNVNHKPSNTKVDKRVEPKSCPPCGGGGSDIQMTQSPSSLSASVGDRVTITCRASENIYSYLAWYQQKPGKAPKLLIYNAKTLAEGVPSRFSGSGSGTDFTLTISSLQPEDFATYYCQHHYGTPRTFGGGTKVEIKGGGGSGGGGSGGGGSGGGGSQVQLVQSGAEVKKPGASVKVSCKASGYTFTSYWMNWVRQAPGQGLEWMGRIDPYDSETHYAQKLQGRVTMTTDTSTSTAYMELRSLRSDDTAVYYCARGGYDFDVGTLYWFFDVWGQGTTVTVSS

SEQ ID NO: 259 - protein, 1141 aa, Artificial Sequence
  source: /note="Description of Artificial Sequence: Synthetic CD3cap137-ALB-MC3v2-hF3.5Fd-NKG2A sequence"
QDGNEEMGGITQTPYKVSISGTTVILTGGGSGGGSGGGSEVAHRFKDLGEENFKALVLIAFAQYLQQCPFEDHVKLVNEVTEFAKTCVADESAENCDKSLHTLFGDKLCTVATLRETYGEMADCCAKQEPERNECFLQHKDDNPNLPRLVRPEVDVMCTAFHDNEETFLKKYLYEIARRHPYFYAPELLFFAKRYKAAFTECCQAADKAACLLPKLDELRDEGKASSAKQRLKCASLQKFGERAFKAWAVARLSQRFPKAEFAEVSKLVTDLTKVHTECCHGDLLECADDRADLAKYICENQDSISSKLKECCEKPLLEKSHCIAEVENDEMPADLPSLAADFVESKDVCKNYAEAKDVFLGMFLYEYARRHPDYSVVLLLRLAKTYETTLEKCCAAADPHECYAKVFDEFKPLVEEPQNLIKQNCELFEQLGEYKFQNALLVRYTKKVPQVSTPTLVEVSRNLGKVGSKCCKHPEAKRMPCAEDYLSVVLNQLCVLHEKTPVSDRVTKCCTESLVNRRPCFSALEVDETYVPKEFNAETFTFHADICTLSEKERQIKKQTALVELVKHKPKATKEQLKAVMDDFAAFVEKCCKADDKETCFAEEGKKLVAASQAAGGSGGSPLGLAGGSGSGRKGSGSLSGRSDNHGGSGGSEVQLVESGGGLVQPGGSLRLSCAASGFTFNTYAMNWVRQAPGKGLEWVARIRSKYNNYATYYADSVKDRFTISRDDSKNTLYLQMNSLRAEDTAVYYCVRHGNFGNSYVSWFAYWGQGTMVTVSSASTKGPSVFPLAPSSKSTSGGTAALGCLVKDYFPEPVTVSWNSGALTSGVHTFPAVLQSSGLYSLSSVVTVPSSSLGTQTYICNVNHKPSNTKVDKRVEPKSCPPCGGGGSDIQMTQSPSSLSASVGDRVTITCRASENIYSYLAWYQQKPGKAPKLLIYNAKTLAEGVPSRFSGSGSGTDFTLTISSLQPEDFATYYCQHHYGTPRTFGGGTKVEIKGGGGSGGGGSGGGGSGGGGSQVQLVQSGAEVKKPGASVKVSCKASGYTFTSYWMNWVRQAPGQGLEWMGRIDPYDSETHYAQKLQGRVTMTTDTSTSTAYMELRSLRSDDTAVYYCARGGYDFDVGTLYWFFDVWGQGTTVTVSS

SEQ ID NO: 260 - protein, 1145 aa, Artificial Sequence
  source: /note="Description of Artificial Sequence: Synthetic CD3cap137-ALB-MC3v3-hF3.5Fd-NKG2A sequence"
QDGNEEMGGITQTPYKVSISGTTVILTGGGSGGGSGGGSEVAHRFKDLGEENFKALVLIAFAQYLQQCPFEDHVKLVNEVTEFAKTCVADESAENCDKSLHTLFGDKLCTVATLRETYGEMADCCAKQEPERNECFLQHKDDNPNLPRLVRPEVDVMCTAFHDNEETFLKKYLYEIARRHPYFYAPELLFFAKRYKAAFTECCQAADKAACLLPKLDELRDEGKASSAKQRLKCASLQKFGERAFKAWAVARLSQRFPKAEFAEVSKLVTDLTKVHTECCHGDLLECADDRADLAKYICENQDSISSKLKECCEKPLLEKSHCIAEVENDEMPADLPSLAADFVESKDVCKNYAEAKDVFLGMFLYEYARRHPDYSVVLLLRLAKTYETTLEKCCAAADPHECYAKVFDEFKPLVEEPQNLIKQNCELFEQLGEYKFQNALLVRYTKKVPQVSTPTLVEVSRNLGKVGSKCCKHPEAKRMPCAEDYLSVVLNQLCVLHEKTPVSDRVTKCCTESLVNRRPCFSALEVDETYVPKEFNAETFTFHADICTLSEKERQIKKQTALVELVKHKPKATKEQLKAVMDDFAAFVEKCCKADDKETCFAEEGKKLVAASQAAGGSGGSPLGLAGGSGSGSGRKGSGSGSLSGRSDNHGGSGGSEVQLVESGGGLVQPGGSLRLSCAASGFTFNTYAMNWVRQAPGKGLEWVARIRSKYNNYATYYADSVKDRFTISRDDSKNTLYLQMNSLRAEDTAVYYCVRHGNFGNSYVSWFAYWGQGTMVTVSSASTKGPSVFPLAPSSKSTSGGTAALGCLVKDYFPEPVTVSWNSGALTSGVHTFPAVLQSSGLYSLSSVVTVPSSSLGTQTYICNVNHKPSNTKVDKRVEPKSCPPCGGGGSDIQMTQSPSSLSASVGDRVTITCRASENIYSYLAWYQQKPGKAPKLLIYNAKTLAEGVPSRFSGSGSGTDFTLTISSLQPEDFATYYCQHHYGTPRTFGGGTKVEIKGGGGSGGGGSGGGGSGGGGSQVQLVQSGAEVKKPGASVKVSCKASGYTFTSYWMNWVRQAPGQGLEWMGRIDPYDSETHYAQKLQGRVTMTTDTSTSTAYMELRSLRSDDTAVYYCARGGYDFDVGTLYWFFDVWGQGTTVTVSS

SEQ ID NO: 261 - DNA, 1479 bp, Artificial Sequence
  source: /note="Description of Artificial Sequence: Synthetic h1F3.5Fd- KYK-2.0_ScFv(L-H) sequence"
ggcggcagcggcggctccgaggtgcagctggtggagtccggcggcggcctggtgcagcccggcggcagcctgaggctgtcctgcgccgcctctggcttcacctttaacacatacgcaatgaattgggtgcgccaggcaccaggcaagggactggagtgggtggcccggatcagaagcaagtacaacaattatgccacctactatgccgactccgtgaaggatcggtttaccatcagcagagacgattccaagaacacactgtatctgcagatgaatagcctgcgggccgaggatacagccgtgtactattgcgtgagacacggcaactttggcaattcttacgtgagctggttcgcctattggggccagggcaccatggtgacagtgtcctctgcctctaccaagggacctagcgtgttcccactggcacctagctccaagtctaccagcggaggcacagccgccctgggatgtctggtgaaggactactttccagagcccgtgacagtgtcctggaactctggcgccctgaccagcggagtgcacacattccctgccgtgctgcagtctagcggcctgtactccctgtcctctgtggtgaccgtgccaagctcctctctgggcacccagacatatatctgcaacgtgaatcacaagccctctaatacaaaggtggacaagagggtggagcctaagagctgccccccttgtggcggaggcggtagccagtctgctctgacccagccagcctccgtctccggttcaccaggacagtcaatcacaatctcatgtagtggaagttcatcaaatatcggcaacaatgccgtgaactggtaccagcagctgcccggcaaggctcctaagctgctgatctactatgacgatctgctgccttctggcgtgtccgacagattctctggctccaagagcggcacctctgcctttctggctatcagcggcctgcagtctgaggacgaggccgattactattgcgccgcttgggacgattccctgaatggaccagtgttcggaggaggaaccaagctgacagtgctgggcggaggcgggtctggaggtggagggagtggaggaggggggagcggtgggggaggtagccaggtgcagctggtggagagcggaggaggcctggtgaagccaggaggctccctgaggctgagctgtgccgcttctggcttcaccttttccagctacggaatgcactgggtgaggcaggctccaggcaagggcctggagtgggtggctttcatccggtatgacggctccaacaagtactatgccgatagcgtgaagggcaggtttaccatctcccgggataacagcaagaatacactgtatctgcagatgaattctctgagagccgaggacacagccgtgtactattgcgctaaggatcgcggcctgggggacggaacttactttgactactgggggcaggggactactgtgactgtctcatca

SEQ ID NO: 262 - DNA, 1479 bp, Artificial Sequence
  source: /note="Description of Artificial Sequence: Synthetic h1F3.5Fd- KYK-2.0_ScFv(H-L) sequence"
ggcggcagcggcggctccgaggtgcagctggtggagtccggcggcggcctggtgcagcccggcggcagcctgaggctgtcctgcgccgcctctggcttcacctttaacacatacgcaatgaattgggtgcgccaggcaccaggcaagggactggagtgggtggcccggatcagaagcaagtacaacaattatgccacctactatgccgactccgtgaaggatcggtttaccatcagcagagacgattccaagaacacactgtatctgcagatgaatagcctgcgggccgaggatacagccgtgtactattgcgtgagacacggcaactttggcaattcttacgtgagctggttcgcctattggggccagggcaccatggtgacagtgtcctctgcctctaccaagggacctagcgtgttcccactggcacctagctccaagtctaccagcggaggcacagccgccctgggatgtctggtgaaggactactttccagagcccgtgacagtgtcctggaactctggcgccctgaccagcggagtgcacacattccctgccgtgctgcagtctagcggcctgtactccctgtcctctgtggtgaccgtgccaagctcctctctgggcacccagacatatatctgcaacgtgaatcacaagccctctaatacaaaggtggacaagagggtggagcctaagagctgccccccttgtggcggaggcggtagccaggtgcagctggtggagagcggaggaggcctggtgaagccaggaggctccctgaggctgagctgtgccgcttctggcttcaccttttccagctacggaatgcactgggtgaggcaggctccaggcaagggcctggagtgggtggctttcatccggtatgacggctccaacaagtactatgccgatagcgtgaagggcaggtttaccatctcccgggataacagcaagaatacactgtatctgcagatgaattctctgagagccgaggacacagccgtgtactattgcgctaaggatcgcggcctgggggacggaacttactttgactactgggggcaggggactactgtgactgtctcatcaggcggaggcgggtctggaggtggagggagtggaggaggggggagcggtgggggaggtagccagtctgctctgacccagccagcctccgtctccggttcaccaggacagtcaatcacaatctcatgtagtggaagttcatcaaatatcggcaacaatgccgtgaactggtaccagcagctgcccggcaaggctcctaagctgctgatctactatgacgatctgctgccttctggcgtgtccgacagattctctggctccaagagcggcacctctgcctttctggctatcagcggcctgcagtctgaggacgaggccgattactattgcgccgcttgggacgattccctgaatggaccagtgttcggaggaggaaccaagctgacagtgctg

SEQ ID NO: 263 - DNA, 1482 bp, Artificial Sequence
  source: /note="Description of Artificial Sequence: Synthetic h1F3.5Fd- NKG2A_ScFv(L-H) sequence"
ggcggcagcggcggctccgaggtgcagctggtggagtccggcggcggcctggtgcagcccggcggcagcctgaggctgtcctgcgccgcctctggcttcacctttaacacatacgcaatgaattgggtgcgccaggcaccaggcaagggactggagtgggtggcccggatcagaagcaagtacaacaattatgccacctactatgccgactccgtgaaggatcggtttaccatcagcagagacgattccaagaacacactgtatctgcagatgaatagcctgcgggccgaggatacagccgtgtactattgcgtgagacacggcaactttggcaattcttacgtgagctggttcgcctattggggccagggcaccatggtgacagtgtcctctgcctctaccaagggacctagcgtgttcccactggcacctagctccaagtctaccagcggaggcacagccgccctgggatgtctggtgaaggactactttccagagcccgtgacagtgtcctggaactctggcgccctgaccagcggagtgcacacattccctgccgtgctgcagtctagcggcctgtactccctgtcctctgtggtgaccgtgccaagctcctctctgggcacccagacatatatctgcaacgtgaatcacaagccctctaatacaaaggtggacaagagggtggagcctaagagctgccccccttgtggcggaggcggtagcgacatccagatgacacagtctccctcttccctgtctgcttccgtgggcgatagagtgacaatcacctgtcgcgccagcgagaacatctactcttatctggcttggtaccagcagaagcccggcaaggcccctaagctgctgatctataatgccaagacactggctgagggcgtgccttccaggttcagcggatctggatccggaaccgactttacactgaccatcagctctctgcagccagaggattttgccacatactattgccagcatcattacggaacaccaagaacattcggcgggggaacaaaagtggaaatcaagggcggaggcgggtctggaggtggagggagtggaggaggggggagcggtgggggaggtagccaggtccagctggtgcagtcaggagccgaggtgaagaagccaggggcatcagtcaaggtgtcatgtaaagcatcaggttatacttttacctcctactggatgaactgggtgaggcaggctccaggacagggcctggagtggatgggaaggatcgacccctacgatagcgagacacactatgctcagaagctgcagggcagagtgaccatgaccacagacacctccacaagcaccgcctatatggagctgaggagcctgcggtctgacgataccgccgtgtactattgcgctcgcggcggctacgacttcgatgtgggcacactgtattggttctttgacgtgtggggccagggcaccacagtgaccgtgtccagc

SEQ ID NO: 264 - DNA, 1482 bp, Artificial Sequence
  source: /note="Description of Artificial Sequence: Synthetic h1F3.5Fd- NKG2A_ScFv(H-L) sequence"
ggcggcagcggcggctccgaggtgcagctggtggagtccggcggcggcctggtgcagcccggcggcagcctgaggctgtcctgcgccgcctctggcttcacctttaacacatacgcaatgaattgggtgcgccaggcaccaggcaagggactggagtgggtggcccggatcagaagcaagtacaacaattatgccacctactatgccgactccgtgaaggatcggtttaccatcagcagagacgattccaagaacacactgtatctgcagatgaatagcctgcgggccgaggatacagccgtgtactattgcgtgagacacggcaactttggcaattcttacgtgagctggttcgcctattggggccagggcaccatggtgacagtgtcctctgcctctaccaagggacctagcgtgttcccactggcacctagctccaagtctaccagcggaggcacagccgccctgggatgtctggtgaaggactactttccagagcccgtgacagtgtcctggaactctggcgccctgaccagcggagtgcacacattccctgccgtgctgcagtctagcggcctgtactccctgtcctctgtggtgaccgtgccaagctcctctctgggcacccagacatatatctgcaacgtgaatcacaagccctctaatacaaaggtggacaagagggtggagcctaagagctgccccccttgtggcggaggcggtagccaggtccagctggtgcagtcaggagccgaggtgaagaagccaggggcatcagtcaaggtgtcatgtaaagcatcaggttatacttttacctcctactggatgaactgggtgaggcaggctccaggacagggcctggagtggatgggaaggatcgacccctacgatagcgagacacactatgctcagaagctgcagggcagagtgaccatgaccacagacacctccacaagcaccgcctatatggagctgaggagcctgcggtctgacgataccgccgtgtactattgcgctcgcggcggctacgacttcgatgtgggcacactgtattggttctttgacgtgtggggccagggcaccacagtgaccgtgtccagcggcggaggcgggtctggaggtggagggagtggaggaggggggagcggtgggggaggtagcgacatccagatgacacagtctccctcttccctgtctgcttccgtgggcgatagagtgacaatcacctgtcgcgccagcgagaacatctactcttatctggcttggtaccagcagaagcccggcaaggcccctaagctgctgatctataatgccaagacactggctgagggcgtgccttccaggttcagcggatctggatccggaaccgactttacactgaccatcagctctctgcagccagaggattttgccacatactattgccagcatcattacggaacaccaagaacattcggcgggggaacaaaagtggaaatcaag

SEQ ID NO: 265 - DNA, 1479 bp, Artificial Sequence
  source: /note="Description of Artificial Sequence: Synthetic h1F3.5Fd- KYK-2.0 mut_ScFv(L-H) sequence"
ggcggcagcggcggctccgaggtgcagctggtggagtccggcggcggcctggtgcagcccggcggcagcctgaggctgtcctgcgccgcctctggcttcacctttaacacatacgcaatgaattgggtgcgccaggcaccaggcaagggactggagtgggtggcccggatcagaagcaagtacaacaattatgccacctactatgccgactccgtgaaggatcggtttaccatcagcagagacgattccaagaacacactgtatctgcagatgaatagcctgcgggccgaggatacagccgtgtactattgcgtgagacacggcaactttggcaattcttacgtgagctggttcgcctattggggccagggcaccatggtgacagtgtcctctgcctctaccaagggacctagcgtgttcccactggcacctagctccaagtctaccagcggaggcacagccgccctgggatgtctggtgaaggactactttccagagcccgtgacagtgtcctggaactctggcgccctgaccagcggagtgcacacattccctgccgtgctgcagtctagcggcctgtactccctgtcctctgtggtgaccgtgccaagctcctctctgggcacccagacatatatctgcaacgtgaatcacaagccctctaatacaaaggtggacaagagggtggagcctaagagctgccccccttgtggcggaggcggtagccagtctgctctgacccagccagcctccgtctccggttcaccaggacagtcaatcacaatctcatgtagtggaagttcatcaaatatcggcaacaatgccgtgaactggtaccagcagctgcccggcaaggctcctaagctgctgatctacgccgacgatctgctgccttctggcgtgtccgacagattctctggctccaagagcggcacctctgcctttctggctatcagcggcctgcagtctgaggacgaggccgattactattgcgccgcttgggacgattccctgaatggaccagtgttcggaggaggaaccaagctgacagtgctgggcggaggcgggtctggaggtggagggagtggaggaggggggagcggtgggggaggtagccaggtgcagctggtggagagcggaggaggcctggtgaagccaggaggctccctgaggctgagctgtgccgcttctggcttcaccttttccagctacggaatgcactgggtgaggcaggctccaggcaagggcctggagtgggtggctttcatccggtatgacggctccaacaagtactatgccgatagcgtgaagggcaggtttaccatctcccgggataacagcaagaatacactgtatctgcagatgaattctctgagagccgaggacacagccgtgtactattgcgctaaggatgccggcgagggggacggaacttactttgactactgggggcaggggactactgtgactgtctcatca

SEQ ID NO: 266 - DNA, 1479 bp, Artificial Sequence
  source: /note="Description of Artificial Sequence: Synthetic h1F3.5Fd- KYK-2.0 mut_ScFv(H-L) sequence"
ggcggcagcggcggctccgaggtgcagctggtggagtccggcggcggcctggtgcagcccggcggcagcctgaggctgtcctgcgccgcctctggcttcacctttaacacatacgcaatgaattgggtgcgccaggcaccaggcaagggactggagtgggtggcccggatcagaagcaagtacaacaattatgccacctactatgccgactccgtgaaggatcggtttaccatcagcagagacgattccaagaacacactgtatctgcagatgaatagcctgcgggccgaggatacagccgtgtactattgcgtgagacacggcaactttggcaattcttacgtgagctggttcgcctattggggccagggcaccatggtgacagtgtcctctgcctctaccaagggacctagcgtgttcccactggcacctagctccaagtctaccagcggaggcacagccgccctgggatgtctggtgaaggactactttccagagcccgtgacagtgtcctggaactctggcgccctgaccagcggagtgcacacattccctgccgtgctgcagtctagcggcctgtactccctgtcctctgtggtgaccgtgccaagctcctctctgggcacccagacatatatctgcaacgtgaatcacaagccctctaatacaaaggtggacaagagggtggagcctaagagctgccccccttgtggcggaggcggtagccaggtgcagctggtggagagcggaggaggcctggtgaagccaggaggctccctgaggctgagctgtgccgcttctggcttcaccttttccagctacggaatgcactgggtgaggcaggctccaggcaagggcctggagtgggtggctttcatccggtatgacggctccaacaagtactatgccgatagcgtgaagggcaggtttaccatctcccgggataacagcaagaatacactgtatctgcagatgaattctctgagagccgaggacacagccgtgtactattgcgctaaggatgccggcgagggggacggaacttactttgactactgggggcaggggactactgtgactgtctcatcaggcggaggcgggtctggaggtggagggagtggaggaggggggagcggtgggggaggtagccagtctgctctgacccagccagcctccgtctccggttcaccaggacagtcaatcacaatctcatgtagtggaagttcatcaaatatcggcaacaatgccgtgaactggtaccagcagctgcccggcaaggctcctaagctgctgatctacgccgacgatctgctgccttctggcgtgtccgacagattctctggctccaagagcggcacctctgcctttctggctatcagcggcctgcagtctgaggacgaggccgattactattgcgccgcttgggacgattccctgaatggaccagtgttcggaggaggaaccaagctgacagtgctg

SEQ ID NO: 267 - DNA, 1482 bp, Artificial Sequence
  source: /note="Description of Artificial Sequence: Synthetic h1F3.5Fd- NKG2A mut_ScFv(L-H) sequence"
ggcggcagcggcggctccgaggtgcagctggtggagtccggcggcggcctggtgcagcccggcggcagcctgaggctgtcctgcgccgcctctggcttcacctttaacacatacgcaatgaattgggtgcgccaggcaccaggcaagggactggagtgggtggcccggatcagaagcaagtacaacaattatgccacctactatgccgactccgtgaaggatcggtttaccatcagcagagacgattccaagaacacactgtatctgcagatgaatagcctgcgggccgaggatacagccgtgtactattgcgtgagacacggcaactttggcaattcttacgtgagctggttcgcctattggggccagggcaccatggtgacagtgtcctctgcctctaccaagggacctagcgtgttcccactggcacctagctccaagtctaccagcggaggcacagccgccctgggatgtctggtgaaggactactttccagagcccgtgacagtgtcctggaactctggcgccctgaccagcggagtgcacacattccctgccgtgctgcagtctagcggcctgtactccctgtcctctgtggtgaccgtgccaagctcctctctgggcacccagacatatatctgcaacgtgaatcacaagccctctaatacaaaggtggacaagagggtggagcctaagagctgccccccttgtggcggaggcggtagcgacatccagatgacacagtctccctcttccctgtctgcttccgtgggcgatagagtgacaatcacctgtcgcgccagcgagaacatctactctgccctggcttggtaccagcagaagcccggcaaggcccctaagctgctgatctataatgccaagacactggctgagggcgtgccttccaggttcagcggatctggatccggaaccgactttacactgaccatcagctctctgcagccagaggattttgccacatactattgccagcatcatgccggaacaccaagaacattcggcgggggaacaaaagtggaaatcaagggcggaggcgggtctggaggtggagggagtggaggaggggggagcggtgggggaggtagccaggtccagctggtgcagtcaggagccgaggtgaagaagccaggggcatcagtcaaggtgtcatgtaaagcatcaggttatacttttacctcctactggatgaactgggtgaggcaggctccaggacagggcctggagtggatgggaaggatcgacccctacgatagcgagacacactatgctcagaagctgcagggcagagtgaccatgaccacagacacctccacaagcaccgcctatatggagctgaggagcctgcggtctgacgataccgccgtgtactattgcgctcgcggcggctacgacttcgatgtggacacactgtattggttctttgacgtgtggggccagggcaccacagtgaccgtgtccagc

SEQ ID NO: 268 - DNA, 1482 bp, Artificial Sequence
  source: /note="Description of Artificial Sequence: Synthetic h1F3.5Fd- NKG2A mut_ScFv(H-L) sequence"
ggcggcagcggcggctccgaggtgcagctggtggagtccggcggcggcctggtgcagcccggcggcagcctgaggctgtcctgcgccgcctctggcttcacctttaacacatacgcaatgaattgggtgcgccaggcaccaggcaagggactggagtgggtggcccggatcagaagcaagtacaacaattatgccacctactatgccgactccgtgaaggatcggtttaccatcagcagagacgattccaagaacacactgtatctgcagatgaatagcctgcgggccgaggatacagccgtgtactattgcgtgagacacggcaactttggcaattcttacgtgagctggttcgcctattggggccagggcaccatggtgacagtgtcctctgcctctaccaagggacctagcgtgttcccactggcacctagctccaagtctaccagcggaggcacagccgccctgggatgtctggtgaaggactactttccagagcccgtgacagtgtcctggaactctggcgccctgaccagcggagtgcacacattccctgccgtgctgcagtctagcggcctgtactccctgtcctctgtggtgaccgtgccaagctcctctctgggcacccagacatatatctgcaacgtgaatcacaagccctctaatacaaaggtggacaagagggtggagcctaagagctgccccccttgtggcggaggcggtagccaggtccagctggtgcagtcaggagccgaggtgaagaagccaggggcatcagtcaaggtgtcatgtaaagcatcaggttatacttttacctcctactggatgaactgggtgaggcaggctccaggacagggcctggagtggatgggaaggatcgacccctacgatagcgagacacactatgctcagaagctgcagggcagagtgaccatgaccacagacacctccacaagcaccgcctatatggagctgaggagcctgcggtctgacgataccgccgtgtactattgcgctcgcggcggctacgacttcgatgtggacacactgtattggttctttgacgtgtggggccagggcaccacagtgaccgtgtccagcggcggaggcgggtctggaggtggagggagtggaggaggggggagcggtgggggaggtagcgacatccagatgacacagtctccctcttccctgtctgcttccgtgggcgatagagtgacaatcacctgtcgcgccagcgagaacatctactctgccctggcttggtaccagcagaagcccggcaaggcccctaagctgctgatctataatgccaagacactggctgagggcgtgccttccaggttcagcggatctggatccggaaccgactttacactgaccatcagctctctgcagccagaggattttgccacatactattgccagcatcatgccggaacaccaagaacattcggcgggggaacaaaagtggaaatcaag

SEQ ID NO: 269 - DNA, 1482 bp, Artificial Sequence
  source: /note="Description of Artificial Sequence: Synthetic h1F3.5FdMut3- NKG2A_ScFv(L-H) sequence"
ggcggcagcggcggctccgaggtgcagctggtggagtccggcggcggcctggtgcagcccggcggcagcctgaggctgtcctgcgccgcctctggcttcacctttaacacatacgcaatgaattgggtgcgccaggcaccaggcaagggactggagtgggtggcccggatcggcagcggcggaaacggctatgccacctactatgccgactccgtgaaggatcggtttaccatcagcagagacgattccaagaacacactgtatctgcagatgaatagcctgcgggccgaggatacagccgtgtactattgcgtgagacacggcaactttggcgccagcgctcggagctggttcgcctattggggccagggcaccatggtgacagtgtcctctgcctctaccaagggacctagcgtgttcccactggcacctagctccaagtctaccagcggaggcacagccgccctgggatgtctggtgaaggactactttccagagcccgtgacagtgtcctggaactctggcgccctgaccagcggagtgcacacattccctgccgtgctgcagtctagcggcctgtactccctgtcctctgtggtgaccgtgccaagctcctctctgggcacccagacatatatctgcaacgtgaatcacaagccctctaatacaaaggtggacaagagggtggagcctaagagctgccccccttgtggcggaggcggtagcgacatccagatgacacagtctccctcttccctgtctgcttccgtgggcgatagagtgacaatcacctgtcgcgccagcgagaacatctactcttatctggcttggtaccagcagaagcccggcaaggcccctaagctgctgatctataatgccaagacactggctgagggcgtgccttccaggttcagcggatctggatccggaaccgactttacactgaccatcagctctctgcagccagaggattttgccacatactattgccagcatcattacggaacaccaagaacattcggcgggggaacaaaagtggaaatcaagggcggaggcgggtctggaggtggagggagtggaggaggggggagcggtgggggaggtagccaggtccagctggtgcagtcaggagccgaggtgaagaagccaggggcatcagtcaaggtgtcatgtaaagcatcaggttatacttttacctcctactggatgaactgggtgaggcaggctccaggacagggcctggagtggatgggaaggatcgacccctacgatagcgagacacactatgctcagaagctgcagggcagagtgaccatgaccacagacacctccacaagcaccgcctatatggagctgaggagcctgcggtctgacgataccgccgtgtactattgcgctcgcggcggctacgacttcgatgtgggcacactgtattggttctttgacgtgtggggccagggcaccacagtgaccgtgtccagc

SEQ ID NO: 270 - DNA, 1479 bp, Artificial Sequence
  source: /note="Description of Artificial Sequence: Synthetic h1F3.5FdMut3- KYK2.0_ScFv(L-H) sequence"
ggcggcagcggcggctccgaggtgcagctggtggagtccggcggcggcctggtgcagcccggcggcagcctgaggctgtcctgcgccgcctctggcttcacctttaacacatacgcaatgaattgggtgcgccaggcaccaggcaagggactggagtgggtggcccggatcggcagcggcggaaacggctatgccacctactatgccgactccgtgaaggatcggtttaccatcagcagagacgattccaagaacacactgtatctgcagatgaatagcctgcgggccgaggatacagccgtgtactattgcgtgagacacggcaactttggcgccagcgctcggagctggttcgcctattggggccagggcaccatggtgacagtgtcctctgcctctaccaagggacctagcgtgttcccactggcacctagctccaagtctaccagcggaggcacagccgccctgggatgtctggtgaaggactactttccagagcccgtgacagtgtcctggaactctggcgccctgaccagcggagtgcacacattccctgccgtgctgcagtctagcggcctgtactccctgtcctctgtggtgaccgtgccaagctcctctctgggcacccagacatatatctgcaacgtgaatcacaagccctctaatacaaaggtggacaagagggtggagcctaagagctgccccccttgtggcggaggcggtagccagtctgctctgacccagccagcctccgtctccggttcaccaggacagtcaatcacaatctcatgtagtggaagttcatcaaatatcggcaacaatgccgtgaactggtaccagcagctgcccggcaaggctcctaagctgctgatctactatgacgatctgctgccttctggcgtgtccgacagattctctggctccaagagcggcacctctgcctttctggctatcagcggcctgcagtctgaggacgaggccgattactattgcgccgcttgggacgattccctgaatggaccagtgttcggaggaggaaccaagctgacagtgctgggcggaggcgggtctggaggtggagggagtggaggaggggggagcggtgggggaggtagccaggtgcagctggtggagagcggaggaggcctggtgaagccaggaggctccctgaggctgagctgtgccgcttctggcttcaccttttccagctacggaatgcactgggtgaggcaggctccaggcaagggcctggagtgggtggctttcatccggtatgacggctccaacaagtactatgccgatagcgtgaagggcaggtttaccatctcccgggataacagcaagaatacactgtatctgcagatgaattctctgagagccgaggacacagccgtgtactattgcgctaaggatcgcggcctgggggacggaacttactttgactactgggggcaggggactactgtgactgtctcatca

SEQ ID NO: 271 - DNA, 1482 bp, Artificial Sequence
  source: /note="Description of Artificial Sequence: Synthetic h1F3.5FdMut4- NKG2A_ScFv(L-H) sequence"
ggcggcagcggcggcagcgaggtgcagctggtggagagcggcggcggcctggtgcagcccggcggcagcctgcgcctgagctgcgccgccagcggcttcaccttcaacggcggcagcggcggctgggtgcgccaggcccccggcaagggcctggagtgggtggccggcggcggcagcggcggcggcggcagcggcggcggcagcggcggcagcggcggcggccgcttcaccatcagccgcgacgacagcaagaacaccctgtacctgcagatgaacagcctgcgcgccgaggacaccgccgtgtactactgcgtgcgcggcggcggcagcggcggcagcggcggcagcggcggcggcggctggggccagggcaccatggtgaccgtgagcagcgcctctaccaagggacctagcgtgttcccactggcacctagctccaagtctaccagcggaggcacagccgccctgggatgtctggtgaaggactactttccagagcccgtgacagtgtcctggaactctggcgccctgaccagcggagtgcacacattccctgccgtgctgcagtctagcggcctgtactccctgtcctctgtggtgaccgtgccaagctcctctctgggcacccagacatatatctgcaacgtgaatcacaagccctctaatacaaaggtggacaagagggtggagcctaagagctgccccccttgtggcggaggcggtagcgacatccagatgacacagtctccctcttccctgtctgcttccgtgggcgatagagtgacaatcacctgtcgcgccagcgagaacatctactcttatctggcttggtaccagcagaagcccggcaaggcccctaagctgctgatctataatgccaagacactggctgagggcgtgccttccaggttcagcggatctggatccggaaccgactttacactgaccatcagctctctgcagccagaggattttgccacatactattgccagcatcattacggaacaccaagaacattcggcgggggaacaaaagtggaaatcaagggcggaggcgggtctggaggtggagggagtggaggaggggggagcggtgggggaggtagccaggtccagctggtgcagtcaggagccgaggtgaagaagccaggggcatcagtcaaggtgtcatgtaaagcatcaggttatacttttacctcctactggatgaactgggtgaggcaggctccaggacagggcctggagtggatgggaaggatcgacccctacgatagcgagacacactatgctcagaagctgcagggcagagtgaccatgaccacagacacctccacaagcaccgcctatatggagctgaggagcctgcggtctgacgataccgccgtgtactattgcgctcgcggcggctacgacttcgatgtgggcacactgtattggttctttgacgtgtggggccagggcaccacagtgaccgtgtccagc

SEQ ID NO: 272 - DNA, 1479 bp, Artificial Sequence
  source: /note="Description of Artificial Sequence: Synthetic h1F3.5FdMut4- KYK2.0_ScFv(L-H) sequence"
ggcggcagcggcggcagcgaggtgcagctggtggagagcggcggcggcctggtgcagcccggcggcagcctgcgcctgagctgcgccgccagcggcttcaccttcaacggcggcagcggcggctgggtgcgccaggcccccggcaagggcctggagtgggtggccggcggcggcagcggcggcggcggcagcggcggcggcagcggcggcagcggcggcggccgcttcaccatcagccgcgacgacagcaagaacaccctgtacctgcagatgaacagcctgcgcgccgaggacaccgccgtgtactactgcgtgcgcggcggcggcagcggcggcagcggcggcagcggcggcggcggctggggccagggcaccatggtgaccgtgagcagcgcctctaccaagggacctagcgtgttcccactggcacctagctccaagtctaccagcggaggcacagccgccctgggatgtctggtgaaggactactttccagagcccgtgacagtgtcctggaactctggcgccctgaccagcggagtgcacacattccctgccgtgctgcagtctagcggcctgtactccctgtcctctgtggtgaccgtgccaagctcctctctgggcacccagacatatatctgcaacgtgaatcacaagccctctaatacaaaggtggacaagagggtggagcctaagagctgccccccttgtggcggaggcggtagccagtctgctctgacccagccagcctccgtctccggttcaccaggacagtcaatcacaatctcatgtagtggaagttcatcaaatatcggcaacaatgccgtgaactggtaccagcagctgcccggcaaggctcctaagctgctgatctactatgacgatctgctgccttctggcgtgtccgacagattctctggctccaagagcggcacctctgcctttctggctatcagcggcctgcagtctgaggacgaggccgattactattgcgccgcttgggacgattccctgaatggaccagtgttcggaggaggaaccaagctgacagtgctgggcggaggcgggtctggaggtggagggagtggaggaggggggagcggtgggggaggtagccaggtgcagctggtggagagcggaggaggcctggtgaagccaggaggctccctgaggctgagctgtgccgcttctggcttcaccttttccagctacggaatgcactgggtgaggcaggctccaggcaagggcctggagtgggtggctttcatccggtatgacggctccaacaagtactatgccgatagcgtgaagggcaggtttaccatctcccgggataacagcaagaatacactgtatctgcagatgaattctctgagagccgaggacacagccgtgtactattgcgctaaggatcgcggcctgggggacggaacttactttgactactgggggcaggggactactgtgactgtctcatca

SEQ ID NO: 273 - DNA, 1626 bp, Artificial Sequence
  source: /note="Description of Artificial Sequence: Synthetic h1F3.5Fd- KYK-2.0_ScFv(L-H)_MC2_Dcap1 sequence"
ggcggcagcggcggctccgaggtgcagctggtggagtccggcggcggcctggtgcagcccggcggcagcctgaggctgtcctgcgccgcctctggcttcacctttaacacatacgcaatgaattgggtgcgccaggcaccaggcaagggactggagtgggtggcccggatcagaagcaagtacaacaattatgccacctactatgccgactccgtgaaggatcggtttaccatcagcagagacgattccaagaacacactgtatctgcagatgaatagcctgcgggccgaggatacagccgtgtactattgcgtgagacacggcaactttggcaattcttacgtgagctggttcgcctattggggccagggcaccatggtgacagtgtcctctgcctctaccaagggacctagcgtgttcccactggcacctagctccaagtctaccagcggaggcacagccgccctgggatgtctggtgaaggactactttccagagcccgtgacagtgtcctggaactctggcgccctgaccagcggagtgcacacattccctgccgtgctgcagtctagcggcctgtactccctgtcctctgtggtgaccgtgccaagctcctctctgggcacccagacatatatctgcaacgtgaatcacaagccctctaatacaaaggtggacaagagggtggagcctaagagctgccccccttgtggcggaggcggtagccagtctgctctgacccagccagcctccgtctccggttcaccaggacagtcaatcacaatctcatgtagtggaagttcatcaaatatcggcaacaatgccgtgaactggtaccagcagctgcccggcaaggctcctaagctgctgatctactatgacgatctgctgccttctggcgtgtccgacagattctctggctccaagagcggcacctctgcctttctggctatcagcggcctgcagtctgaggacgaggccgattactattgcgccgcttgggacgattccctgaatggaccagtgttcggaggaggaaccaagctgacagtgctgggcggaggcgggtctggaggtggagggagtggaggaggggggagcggtgggggaggtagccaggtgcagctggtggagagcggaggaggcctggtgaagccaggaggctccctgaggctgagctgtgccgcttctggcttcaccttttccagctacggaatgcactgggtgaggcaggctccaggcaagggcctggagtgggtggctttcatccggtatgacggctccaacaagtactatgccgatagcgtgaagggcaggtttaccatctcccgggataacagcaagaatacactgtatctgcagatgaattctctgagagccgaggacacagccgtgtactattgcgctaaggatcgcggcctgggggacggaacttactttgactactgggggcaggggactactgtgactgtctcatcaggtggtagcggcggcagtcctctgggactggcgggcctttctggcagaagcgacaatcacggcggttccggaggttccaactgctatcagttcttcgacgagagcaagaactggtacgagagccaagctagctgcatgtctcagaac

SEQ ID NO: 274 - DNA, 1611 bp, Artificial Sequence
  source: /note="Description of Artificial Sequence: Synthetic h1F3.5Fd- KYK-2.0_ScFv(L-H)_MC2_Dcap2 sequence"
ggcggcagcggcggctccgaggtgcagctggtggagtccggcggcggcctggtgcagcccggcggcagcctgaggctgtcctgcgccgcctctggcttcacctttaacacatacgcaatgaattgggtgcgccaggcaccaggcaagggactggagtgggtggcccggatcagaagcaagtacaacaattatgccacctactatgccgactccgtgaaggatcggtttaccatcagcagagacgattccaagaacacactgtatctgcagatgaatagcctgcgggccgaggatacagccgtgtactattgcgtgagacacggcaactttggcaattcttacgtgagctggttcgcctattggggccagggcaccatggtgacagtgtcctctgcctctaccaagggacctagcgtgttcccactggcacctagctccaagtctaccagcggaggcacagccgccctgggatgtctggtgaaggactactttccagagcccgtgacagtgtcctggaactctggcgccctgaccagcggagtgcacacattccctgccgtgctgcagtctagcggcctgtactccctgtcctctgtggtgaccgtgccaagctcctctctgggcacccagacatatatctgcaacgtgaatcacaagccctctaatacaaaggtggacaagagggtggagcctaagagctgccccccttgtggcggaggcggtagccagtctgctctgacccagccagcctccgtctccggttcaccaggacagtcaatcacaatctcatgtagtggaagttcatcaaatatcggcaacaatgccgtgaactggtaccagcagctgcccggcaaggctcctaagctgctgatctactatgacgatctgctgccttctggcgtgtccgacagattctctggctccaagagcggcacctctgcctttctggctatcagcggcctgcagtctgaggacgaggccgattactattgcgccgcttgggacgattccctgaatggaccagtgttcggaggaggaaccaagctgacagtgctgggcggaggcgggtctggaggtggagggagtggaggaggggggagcggtgggggaggtagccaggtgcagctggtggagagcggaggaggcctggtgaagccaggaggctccctgaggctgagctgtgccgcttctggcttcaccttttccagctacggaatgcactgggtgaggcaggctccaggcaagggcctggagtgggtggctttcatccggtatgacggctccaacaagtactatgccgatagcgtgaagggcaggtttaccatctcccgggataacagcaagaatacactgtatctgcagatgaattctctgagagccgaggacacagccgtgtactattgcgctaaggatcgcggcctgggggacggaacttactttgactactgggggcaggggactactgtgactgtctcatcaggtggtagcggcggcagtcctctgggactggcgggcctttctggcagaagcgacaatcacggcggttccggaggttccctgctgaaggtgtacagcaaggaggaccaagacctgctgaagctggtgaagagc

SEQ ID NO: 275 - DNA, 1665 bp, Artificial Sequence
  source: /note="Description of Artificial Sequence: Synthetic h1F3.5Fd- KYK-2.0_ScFv(L-H)_MC2_Dcap3 sequence"
ggcggcagcggcggctccgaggtgcagctggtggagtccggcggcggcctggtgcagcccggcggcagcctgaggctgtcctgcgccgcctctggcttcacctttaacacatacgcaatgaattgggtgcgccaggcaccaggcaagggactggagtgggtggcccggatcagaagcaagtacaacaattatgccacctactatgccgactccgtgaaggatcggtttaccatcagcagagacgattccaagaacacactgtatctgcagatgaatagcctgcgggccgaggatacagccgtgtactattgcgtgagacacggcaactttggcaattcttacgtgagctggttcgcctattggggccagggcaccatggtgacagtgtcctctgcctctaccaagggacctagcgtgttcccactggcacctagctccaagtctaccagcggaggcacagccgccctgggatgtctggtgaaggactactttccagagcccgtgacagtgtcctggaactctggcgccctgaccagcggagtgcacacattccctgccgtgctgcagtctagcggcctgtactccctgtcctctgtggtgaccgtgccaagctcctctctgggcacccagacatatatctgcaacgtgaatcacaagccctctaatacaaaggtggacaagagggtggagcctaagagctgccccccttgtggcggaggcggtagccagtctgctctgacccagccagcctccgtctccggttcaccaggacagtcaatcacaatctcatgtagtggaagttcatcaaatatcggcaacaatgccgtgaactggtaccagcagctgcccggcaaggctcctaagctgctgatctactatgacgatctgctgccttctggcgtgtccgacagattctctggctccaagagcggcacctctgcctttctggctatcagcggcctgcagtctgaggacgaggccgattactattgcgccgcttgggacgattccctgaatggaccagtgttcggaggaggaaccaagctgacagtgctgggcggaggcgggtctggaggtggagggagtggaggaggggggagcggtgggggaggtagccaggtgcagctggtggagagcggaggaggcctggtgaagccaggaggctccctgaggctgagctgtgccgcttctggcttcaccttttccagctacggaatgcactgggtgaggcaggctccaggcaagggcctggagtgggtggctttcatccggtatgacggctccaacaagtactatgccgatagcgtgaagggcaggtttaccatctcccgggataacagcaagaatacactgtatctgcagatgaattctctgagagccgaggacacagccgtgtactattgcgctaaggatcgcggcctgggggacggaacttactttgactactgggggcaggggactactgtgactgtctcatcaggtggtagcggcggcagtcctctgggactggcgggcctttctggcagaagcgacaatcacggcggttccggaggttccaacaactgctatcagttcttcgacgagagcaagaactggtacgagagccaagctagctgcatgtctcagaacagcacccccaacacctacatctgcatgcagagaacc

SEQ ID NO: 276 - DNA, 1704 bp, Artificial Sequence
  source: /note="Description of Artificial Sequence: Synthetic h1F3.5Fd- KYK-2.0_ScFv(L-H)_MC2_Dcap4 sequence"
ggcggcagcggcggctccgaggtgcagctggtggagtccggcggcggcctggtgcagcccggcggcagcctgaggctgtcctgcgccgcctctggcttcacctttaacacatacgcaatgaattgggtgcgccaggcaccaggcaagggactggagtgggtggcccggatcagaagcaagtacaacaattatgccacctactatgccgactccgtgaaggatcggtttaccatcagcagagacgattccaagaacacactgtatctgcagatgaatagcctgcgggccgaggatacagccgtgtactattgcgtgagacacggcaactttggcaattcttacgtgagctggttcgcctattggggccagggcaccatggtgacagtgtcctctgcctctaccaagggacctagcgtgttcccactggcacctagctccaagtctaccagcggaggcacagccgccctgggatgtctggtgaaggactactttccagagcccgtgacagtgtcctggaactctggcgccctgaccagcggagtgcacacattccctgccgtgctgcagtctagcggcctgtactccctgtcctctgtggtgaccgtgccaagctcctctctgggcacccagacatatatctgcaacgtgaatcacaagccctctaatacaaaggtggacaagagggtggagcctaagagctgccccccttgtggcggaggcggtagccagtctgctctgacccagccagcctccgtctccggttcaccaggacagtcaatcacaatctcatgtagtggaagttcatcaaatatcggcaacaatgccgtgaactggtaccagcagctgcccggcaaggctcctaagctgctgatctactatgacgatctgctgccttctggcgtgtccgacagattctctggctccaagagcggcacctctgcctttctggctatcagcggcctgcagtctgaggacgaggccgattactattgcgccgcttgggacgattccctgaatggaccagtgttcggaggaggaaccaagctgacagtgctgggcggaggcgggtctggaggtggagggagtggaggaggggggagcggtgggggaggtagccaggtgcagctggtggagagcggaggaggcctggtgaagccaggaggctccctgaggctgagctgtgccgcttctggcttcaccttttccagctacggaatgcactgggtgaggcaggctccaggcaagggcctggagtgggtggctttcatccggtatgacggctccaacaagtactatgccgatagcgtgaagggcaggtttaccatctcccgggataacagcaagaatacactgtatctgcagatgaattctctgagagccgaggacacagccgtgtactattgcgctaaggatcgcggcctgggggacggaacttactttgactactgggggcaggggactactgtgactgtctcatcaggtggtagcggcggcagtcctctgggactggcgggcctttctggcagaagcgacaatcacggcggttccggaggttccaagaactggatctgctacaagaacaactgctatcagttcttcgacgagagcaagaactggtacgagagccaagctagctgcatgtctcagaacgctagcctggagaactgcagcacccccaacacctacatctgcatgcagagaacc

SEQ ID NO: 277 - DNA, 1647 bp, Artificial Sequence
  source: /note="Description of Artificial Sequence: Synthetic h1F3.5Fd- KYK-2.0_ScFv(L-H)_MC3_Dcap1 sequence"
ggcggcagcggcggctccgaggtgcagctggtggagtccggcggcggcctggtgcagcccggcggcagcctgaggctgtcctgcgccgcctctggcttcacctttaacacatacgcaatgaattgggtgcgccaggcaccaggcaagggactggagtgggtggcccggatcagaagcaagtacaacaattatgccacctactatgccgactccgtgaaggatcggtttaccatcagcagagacgattccaagaacacactgtatctgcagatgaatagcctgcgggccgaggatacagccgtgtactattgcgtgagacacggcaactttggcaattcttacgtgagctggttcgcctattggggccagggcaccatggtgacagtgtcctctgcctctaccaagggacctagcgtgttcccactggcacctagctccaagtctaccagcggaggcacagccgccctgggatgtctggtgaaggactactttccagagcccgtgacagtgtcctggaactctggcgccctgaccagcggagtgcacacattccctgccgtgctgcagtctagcggcctgtactccctgtcctctgtggtgaccgtgccaagctcctctctgggcacccagacatatatctgcaacgtgaatcacaagccctctaatacaaaggtggacaagagggtggagcctaagagctgccccccttgtggcggaggcggtagccagtctgctctgacccagccagcctccgtctccggttcaccaggacagtcaatcacaatctcatgtagtggaagttcatcaaatatcggcaacaatgccgtgaactggtaccagcagctgcccggcaaggctcctaagctgctgatctactatgacgatctgctgccttctggcgtgtccgacagattctctggctccaagagcggcacctctgcctttctggctatcagcggcctgcagtctgaggacgaggccgattactattgcgccgcttgggacgattccctgaatggaccagtgttcggaggaggaaccaagctgacagtgctgggcggaggcgggtctggaggtggagggagtggaggaggggggagcggtgggggaggtagccaggtgcagctggtggagagcggaggaggcctggtgaagccaggaggctccctgaggctgagctgtgccgcttctggcttcaccttttccagctacggaatgcactgggtgaggcaggctccaggcaagggcctggagtgggtggctttcatccggtatgacggctccaacaagtactatgccgatagcgtgaagggcaggtttaccatctcccgggataacagcaagaatacactgtatctgcagatgaattctctgagagccgaggacacagccgtgtactattgcgctaaggatcgcggcctgggggacggaacttactttgactactgggggcaggggactactgtgactgtctcatcaggtggtagcggcggcagtcctctgggactggcgggcggcagcggccggaagggaagtctttctggcagaagcgacaatcacggcggttccggaggttccaactgctatcagttcttcgacgagagcaagaactggtacgagagccaagctagctgcatgtctcagaac

SEQ ID NO: 278 - DNA, 1632 bp, Artificial Sequence
  source: /note="Description of Artificial Sequence: Synthetic h1F3.5Fd- KYK-2.0_ScFv(L-H)_MC3_Dcap2 sequence"
ggcggcagcggcggctccgaggtgcagctggtggagtccggcggcggcctggtgcagcccggcggcagcctgaggctgtcctgcgccgcctctggcttcacctttaacacatacgcaatgaattgggtgcgccaggcaccaggcaagggactggagtgggtggcccggatcagaagcaagtacaacaattatgccacctactatgccgactccgtgaaggatcggtttaccatcagcagagacgattccaagaacacactgtatctgcagatgaatagcctgcgggccgaggatacagccgtgtactattgcgtgagacacggcaactttggcaattcttacgtgagctggttcgcctattggggccagggcaccatggtgacagtgtcctctgcctctaccaagggacctagcgtgttcccactggcacctagctccaagtctaccagcggaggcacagccgccctgggatgtctggtgaaggactactttccagagcccgtgacagtgtcctggaactctggcgccctgaccagcggagtgcacacattccctgccgtgctgcagtctagcggcctgtactccctgtcctctgtggtgaccgtgccaagctcctctctgggcacccagacatatatctgcaacgtgaatcacaagccctctaatacaaaggtggacaagagggtggagcctaagagctgccccccttgtggcggaggcggtagccagtctgctctgacccagccagcctccgtctccggttcaccaggacagtcaatcacaatctcatgtagtggaagttcatcaaatatcggcaacaatgccgtgaactggtaccagcagctgcccggcaaggctcctaagctgctgatctactatgacgatctgctgccttctggcgtgtccgacagattctctggctccaagagcggcacctctgcctttctggctatcagcggcctgcagtctgaggacgaggccgattactattgcgccgcttgggacgattccctgaatggaccagtgttcggaggaggaaccaagctgacagtgctgggcggaggcgggtctggaggtggagggagtggaggaggggggagcggtgggggaggtagccaggtgcagctggtggagagcggaggaggcctggtgaagccaggaggctccctgaggctgagctgtgccgcttctggcttcaccttttccagctacggaatgcactgggtgaggcaggctccaggcaagggcctggagtgggtggctttcatccggtatgacggctccaacaagtactatgccgatagcgtgaagggcaggtttaccatctcccgggataacagcaagaatacactgtatctgcagatgaattctctgagagccgaggacacagccgtgtactattgcgctaaggatcgcggcctgggggacggaacttactttgactactgggggcaggggactactgtgactgtctcatcaggtggtagcggcggcagtcctctgggactggcgggcggcagcggccggaagggaagtctttctggcagaagcgacaatcacggcggttccggaggttccctgctgaaggtgtacagcaaggaggaccaagacctgctgaagctggtgaagagc

SEQ ID NO: 279 - DNA, 1686 bp, Artificial Sequence
  source: /note="Description of Artificial Sequence: Synthetic h1F3.5Fd- KYK-2.0_ScFv(L-H)_MC3_Dcap3 sequence"
ggcggcagcggcggctccgaggtgcagctggtggagtccggcggcggcctggtgcagcccggcggcagcctgaggctgtcctgcgccgcctctggcttcacctttaacacatacgcaatgaattgggtgcgccaggcaccaggcaagggactggagtgggtggcccggatcagaagcaagtacaacaattatgccacctactatgccgactccgtgaaggatcggtttaccatcagcagagacgattccaagaacacactgtatctgcagatgaatagcctgcgggccgaggatacagccgtgtactattgcgtgagacacggcaactttggcaattcttacgtgagctggttcgcctattggggccagggcaccatggtgacagtgtcctctgcctctaccaagggacctagcgtgttcccactggcacctagctccaagtctaccagcggaggcacagccgccctgggatgtctggtgaaggactactttccagagcccgtgacagtgtcctggaactctggcgccctgaccagcggagtgcacacattccctgccgtgctgcagtctagcggcctgtactccctgtcctctgtggtgaccgtgccaagctcctctctgggcacccagacatatatctgcaacgtgaatcacaagccctctaatacaaaggtggacaagagggtggagcctaagagctgccccccttgtggcggaggcggtagccagtctgctctgacccagccagcctccgtctccggttcaccaggacagtcaatcacaatctcatgtagtggaagttcatcaaatatcggcaacaatgccgtgaactggtaccagcagctgcccggcaaggctcctaagctgctgatctactatgacgatctgctgccttctggcgtgtccgacagattctctggctccaagagcggcacctctgcctttctggctatcagcggcctgcagtctgaggacgaggccgattactattgcgccgcttgggacgattccctgaatggaccagtgttcggaggaggaaccaagctgacagtgctgggcggaggcgggtctggaggtggagggagtggaggaggggggagcggtgggggaggtagccaggtgcagctggtggagagcggaggaggcctggtgaagccaggaggctccctgaggctgagctgtgccgcttctggcttcaccttttccagctacggaatgcactgggtgaggcaggctccaggcaagggcctggagtgggtggctttcatccggtatgacggctccaacaagtactatgccgatagcgtgaagggcaggtttaccatctcccgggataacagcaagaatacactgtatctgcagatgaattctctgagagccgaggacacagccgtgtactattgcgctaaggatcgcggcctgggggacggaacttactttgactactgggggcaggggactactgtgactgtctcatcaggtggtagcggcggcagtcctctgggactggcgggcggcagcggccggaagggaagtctttctggcagaagcgacaatcacggcggttccggaggttccaacaactgctatcagttcttcgacgagagcaagaactggtacgagagccaagctagctgcatgtctcagaacagcacccccaacacctacatctgcatgcagagaacc

SEQ ID NO: 280 - DNA, 1725 bp, Artificial Sequence
  source: /note="Description of Artificial Sequence: Synthetic h1F3.5Fd- KYK-2.0_ScFv(L-H)_MC3_Dcap4 sequence"
ggcggcagcggcggctccgaggtgcagctggtggagtccggcggcggcctggtgcagcccggcggcagcctgaggctgtcctgcgccgcctctggcttcacctttaacacatacgcaatgaattgggtgcgccaggcaccaggcaagggactggagtgggtggcccggatcagaagcaagtacaacaattatgccacctactatgccgactccgtgaaggatcggtttaccatcagcagagacgattccaagaacacactgtatctgcagatgaatagcctgcgggccgaggatacagccgtgtactattgcgtgagacacggcaactttggcaattcttacgtgagctggttcgcctattggggccagggcaccatggtgacagtgtcctctgcctctaccaagggacctagcgtgttcccactggcacctagctccaagtctaccagcggaggcacagccgccctgggatgtctggtgaaggactactttccagagcccgtgacagtgtcctggaactctggcgccctgaccagcggagtgcacacattccctgccgtgctgcagtctagcggcctgtactccctgtcctctgtggtgaccgtgccaagctcctctctgggcacccagacatatatctgcaacgtgaatcacaagccctctaatacaaaggtggacaagagggtggagcctaagagctgccccccttgtggcggaggcggtagccagtctgctctgacccagccagcctccgtctccggttcaccaggacagtcaatcacaatctcatgtagtggaagttcatcaaatatcggcaacaatgccgtgaactggtaccagcagctgcccggcaaggctcctaagctgctgatctactatgacgatctgctgccttctggcgtgtccgacagattctctggctccaagagcggcacctctgcctttctggctatcagcggcctgcagtctgaggacgaggccgattactattgcgccgcttgggacgattccctgaatggaccagtgttcggaggaggaaccaagctgacagtgctgggcggaggcgggtctggaggtggagggagtggaggaggggggagcggtgggggaggtagccaggtgcagctggtggagagcggaggaggcctggtgaagccaggaggctccctgaggctgagctgtgccgcttctggcttcaccttttccagctacggaatgcactgggtgaggcaggctccaggcaagggcctggagtgggtggctttcatccggtatgacggctccaacaagtactatgccgatagcgtgaagggcaggtttaccatctcccgggataacagcaagaatacactgtatctgcagatgaattctctgagagccgaggacacagccgtgtactattgcgctaaggatcgcggcctgggggacggaacttactttgactactgggggcaggggactactgtgactgtctcatcaggtggtagcggcggcagtcctctgggactggcgggcggcagcggccggaagggaagtctttctggcagaagcgacaatcacggcggttccggaggttccaagaactggatctgctacaagaacaactgctatcagttcttcgacgagagcaagaactggtacgagagccaagctagctgcatgtctcagaacgctagcctggagaactgcagcacccccaacacctacatctgcatgcagagaacc

SEQ ID NO: 281 - DNA, 1623 bp, Artificial Sequence
  source: /note="Description of Artificial Sequence: Synthetic h1F3.5Fd- NKG2A_ScFv(L-H)_MC2_Acap1 sequence"
ggcggcagcggcggctccgaggtgcagctggtggagtccggcggcggcctggtgcagcccggcggcagcctgaggctgtcctgcgccgcctctggcttcacctttaacacatacgcaatgaattgggtgcgccaggcaccaggcaagggactggagtgggtggcccggatcagaagcaagtacaacaattatgccacctactatgccgactccgtgaaggatcggtttaccatcagcagagacgattccaagaacacactgtatctgcagatgaatagcctgcgggccgaggatacagccgtgtactattgcgtgagacacggcaactttggcaattcttacgtgagctggttcgcctattggggccagggcaccatggtgacagtgtcctctgcctctaccaagggacctagcgtgttcccactggcacctagctccaagtctaccagcggaggcacagccgccctgggatgtctggtgaaggactactttccagagcccgtgacagtgtcctggaactctggcgccctgaccagcggagtgcacacattccctgccgtgctgcagtctagcggcctgtactccctgtcctctgtggtgaccgtgccaagctcctctctgggcacccagacatatatctgcaacgtgaatcacaagccctctaatacaaaggtggacaagagggtggagcctaagagctgccccccttgtggcggaggcggtagcgacatccagatgacacagtctccctcttccctgtctgcttccgtgggcgatagagtgacaatcacctgtcgcgccagcgagaacatctactcttatctggcttggtaccagcagaagcccggcaaggcccctaagctgctgatctataatgccaagacactggctgagggcgtgccttccaggttcagcggatctggatccggaaccgactttacactgaccatcagctctctgcagccagaggattttgccacatactattgccagcatcattacggaacaccaagaacattcggcgggggaacaaaagtggaaatcaagggcggaggcgggtctggaggtggagggagtggaggaggggggagcggtgggggaggtagccaggtccagctggtgcagtcaggagccgaggtgaagaagccaggggcatcagtcaaggtgtcatgtaaagcatcaggttatacttttacctcctactggatgaactgggtgaggcaggctccaggacagggcctggagtggatgggaaggatcgacccctacgatagcgagacacactatgctcagaagctgcagggcagagtgaccatgaccacagacacctccacaagcaccgcctatatggagctgaggagcctgcggtctgacgataccgccgtgtactattgcgctcgcggcggctacgacttcgatgtgggcacactgtattggttctttgacgtgtggggccagggcaccacagtgaccgtgtccagcggtggtagcggcggcagtcctctgggactggcgggcctttctggcagaagcgacaatcacggcggttccggaggttccctgagcatcgacaacgaggaggagatgaagttcctgagcatcatcagccctagcagctggatc

SEQ ID NO: 282 - DNA, 1620 bp, Artificial Sequence
  source: /note="Description of Artificial Sequence: Synthetic h1F3.5Fd- NKG2A_ScFv(L-H)_MC2_Acap2 sequence"
ggcggcagcggcggctccgaggtgcagctggtggagtccggcggcggcctggtgcagcccggcggcagcctgaggctgtcctgcgccgcctctggcttcacctttaacacatacgcaatgaattgggtgcgccaggcaccaggcaagggactggagtgggtggcccggatcagaagcaagtacaacaattatgccacctactatgccgactccgtgaaggatcggtttaccatcagcagagacgattccaagaacacactgtatctgcagatgaatagcctgcgggccgaggatacagccgtgtactattgcgtgagacacggcaactttggcaattcttacgtgagctggttcgcctattggggccagggcaccatggtgacagtgtcctctgcctctaccaagggacctagcgtgttcccactggcacctagctccaagtctaccagcggaggcacagccgccctgggatgtctggtgaaggactactttccagagcccgtgacagtgtcctggaactctggcgccctgaccagcggagtgcacacattccctgccgtgctgcagtctagcggcctgtactccctgtcctctgtggtgaccgtgccaagctcctctctgggcacccagacatatatctgcaacgtgaatcacaagccctctaatacaaaggtggacaagagggtggagcctaagagctgccccccttgtggcggaggcggtagcgacatccagatgacacagtctccctcttccctgtctgcttccgtgggcgatagagtgacaatcacctgtcgcgccagcgagaacatctactcttatctggcttggtaccagcagaagcccggcaaggcccctaagctgctgatctataatgccaagacactggctgagggcgtgccttccaggttcagcggatctggatccggaaccgactttacactgaccatcagctctctgcagccagaggattttgccacatactattgccagcatcattacggaacaccaagaacattcggcgggggaacaaaagtggaaatcaagggcggaggcgggtctggaggtggagggagtggaggaggggggagcggtgggggaggtagccaggtccagctggtgcagtcaggagccgaggtgaagaagccaggggcatcagtcaaggtgtcatgtaaagcatcaggttatacttttacctcctactggatgaactgggtgaggcaggctccaggacagggcctggagtggatgggaaggatcgacccctacgatagcgagacacactatgctcagaagctgcagggcagagtgaccatgaccacagacacctccacaagcaccgcctatatggagctgaggagcctgcggtctgacgataccgccgtgtactattgcgctcgcggcggctacgacttcgatgtgggcacactgtattggttctttgacgtgtggggccagggcaccacagtgaccgtgtccagcggtggtagcggcggcagtcctctgggactggcgggcctttctggcagaagcgacaatcacggcggttccggaggttccaacgccgagctgaactgcgccgtgctgcaagtgaacagactgaagagcgctcagtgcggc

SEQ ID NO: 283 - DNA, 1680 bp, Artificial Sequence
  source: /note="Description of Artificial Sequence: Synthetic h1F3.5Fd- NKG2A_ScFv(L-H)_MC2_Acap3 sequence"
ggcggcagcggcggctccgaggtgcagctggtggagtccggcggcggcctggtgcagcccggcggcagcctgaggctgtcctgcgccgcctctggcttcacctttaacacatacgcaatgaattgggtgcgccaggcaccaggcaagggactggagtgggtggcccggatcagaagcaagtacaacaattatgccacctactatgccgactccgtgaaggatcggtttaccatcagcagagacgattccaagaacacactgtatctgcagatgaatagcctgcgggccgaggatacagccgtgtactattgcgtgagacacggcaactttggcaattcttacgtgagctggttcgcctattggggccagggcaccatggtgacagtgtcctctgcctctaccaagggacctagcgtgttcccactggcacctagctccaagtctaccagcggaggcacagccgccctgggatgtctggtgaaggactactttccagagcccgtgacagtgtcctggaactctggcgccctgaccagcggagtgcacacattccctgccgtgctgcagtctagcggcctgtactccctgtcctctgtggtgaccgtgccaagctcctctctgggcacccagacatatatctgcaacgtgaatcacaagccctctaatacaaaggtggacaagagggtggagcctaagagctgccccccttgtggcggaggcggtagcgacatccagatgacacagtctccctcttccctgtctgcttccgtgggcgatagagtgacaatcacctgtcgcgccagcgagaacatctactcttatctggcttggtaccagcagaagcccggcaaggcccctaagctgctgatctataatgccaagacactggctgagggcgtgccttccaggttcagcggatctggatccggaaccgactttacactgaccatcagctctctgcagccagaggattttgccacatactattgccagcatcattacggaacaccaagaacattcggcgggggaacaaaagtggaaatcaagggcggaggcgggtctggaggtggagggagtggaggaggggggagcggtgggggaggtagccaggtccagctggtgcagtcaggagccgaggtgaagaagccaggggcatcagtcaaggtgtcatgtaaagcatcaggttatacttttacctcctactggatgaactgggtgaggcaggctccaggacagggcctggagtggatgggaaggatcgacccctacgatagcgagacacactatgctcagaagctgcagggcagagtgaccatgaccacagacacctccacaagcaccgcctatatggagctgaggagcctgcggtctgacgataccgccgtgtactattgcgctcgcggcggctacgacttcgatgtgggcacactgtattggttctttgacgtgtggggccagggcaccacagtgaccgtgtccagcggtggtagcggcggcagtcctctgggactggcgggcctttctggcagaagcgacaatcacggcggttccggaggttccctgagcatcgacaacgaggaggagatgaagttcctgagcatcatcagccctagcagctggatcggcgtgttcaactgcgccgtgctgcaagtgaacagactgaagagcgctcagtgcggc

SEQ ID NO: 284 - DNA, 1650 bp, Artificial Sequence
  source: /note="Description of Artificial Sequence: Synthetic h1F3.5Fd- NKG2A_ScFv(L-H)_MC2_Acap4 sequence"
ggcggcagcggcggctccgaggtgcagctggtggagtccggcggcggcctggtgcagcccggcggcagcctgaggctgtcctgcgccgcctctggcttcacctttaacacatacgcaatgaattgggtgcgccaggcaccaggcaagggactggagtgggtggcccggatcagaagcaagtacaacaattatgccacctactatgccgactccgtgaaggatcggtttaccatcagcagagacgattccaagaacacactgtatctgcagatgaatagcctgcgggccgaggatacagccgtgtactattgcgtgagacacggcaactttggcaattcttacgtgagctggttcgcctattggggccagggcaccatggtgacagtgtcctctgcctctaccaagggacctagcgtgttcccactggcacctagctccaagtctaccagcggaggcacagccgccctgggatgtctggtgaaggactactttccagagcccgtgacagtgtcctggaactctggcgccctgaccagcggagtgcacacattccctgccgtgctgcagtctagcggcctgtactccctgtcctctgtggtgaccgtgccaagctcctctctgggcacccagacatatatctgcaacgtgaatcacaagccctctaatacaaaggtggacaagagggtggagcctaagagctgccccccttgtggcggaggcggtagcgacatccagatgacacagtctccctcttccctgtctgcttccgtgggcgatagagtgacaatcacctgtcgcgccagcgagaacatctactcttatctggcttggtaccagcagaagcccggcaaggcccctaagctgctgatctataatgccaagacactggctgagggcgtgccttccaggttcagcggatctggatccggaaccgactttacactgaccatcagctctctgcagccagaggattttgccacatactattgccagcatcattacggaacaccaagaacattcggcgggggaacaaaagtggaaatcaagggcggaggcgggtctggaggtggagggagtggaggaggggggagcggtgggggaggtagccaggtccagctggtgcagtcaggagccgaggtgaagaagccaggggcatcagtcaaggtgtcatgtaaagcatcaggttatacttttacctcctactggatgaactgggtgaggcaggctccaggacagggcctggagtggatgggaaggatcgacccctacgatagcgagacacactatgctcagaagctgcagggcagagtgaccatgaccacagacacctccacaagcaccgcctatatggagctgaggagcctgcggtctgacgataccgccgtgtactattgcgctcgcggcggctacgacttcgatgtgggcacactgtattggttctttgacgtgtggggccagggcaccacagtgaccgtgtccagcggtggtagcggcggcagtcctctgggactggcgggcctttctggcagaagcgacaatcacggcggttccggaggttccgccttcaagcacgagatcaaggacagcgacaacgccgagctgaactgcgccgtgctgcaagtgaacagactgaagagcgctcagtgcggc

SEQ ID NO: 285 - DNA, 1644 bp, Artificial Sequence
  source: /note="Description of Artificial Sequence: Synthetic h1F3.5Fd- NKG2A_ScFv(L-H)_MC3_Acap1 sequence"
ggcggcagcggcggctccgaggtgcagctggtggagtccggcggcggcctggtgcagcccggcggcagcctgaggctgtcctgcgccgcctctggcttcacctttaacacatacgcaatgaattgggtgcgccaggcaccaggcaagggactggagtgggtggcccggatcagaagcaagtacaacaattatgccacctactatgccgactccgtgaaggatcggtttaccatcagcagagacgattccaagaacacactgtatctgcagatgaatagcctgcgggccgaggatacagccgtgtactattgcgtgagacacggcaactttggcaattcttacgtgagctggttcgcctattggggccagggcaccatggtgacagtgtcctctgcctctaccaagggacctagcgtgttcccactggcacctagctccaagtctaccagcggaggcacagccgccctgggatgtctggtgaaggactactttccagagcccgtgacagtgtcctggaactctggcgccctgaccagcggagtgcacacattccctgccgtgctgcagtctagcggcctgtactccctgtcctctgtggtgaccgtgccaagctcctctctgggcacccagacatatatctgcaacgtgaatcacaagccctctaatacaaaggtggacaagagggtggagcctaagagctgccccccttgtggcggaggcggtagcgacatccagatgacacagtctccctcttccctgtctgcttccgtgggcgatagagtgacaatcacctgtcgcgccagcgagaacatctactcttatctggcttggtaccagcagaagcccggcaaggcccctaagctgctgatctataatgccaagacactggctgagggcgtgccttccaggttcagcggatctggatccggaaccgactttacactgaccatcagctctctgcagccagaggattttgccacatactattgccagcatcattacggaacaccaagaacattcggcgggggaacaaaagtggaaatcaagggcggaggcgggtctggaggtggagggagtggaggaggggggagcggtgggggaggtagccaggtccagctggtgcagtcaggagccgaggtgaagaagccaggggcatcagtcaaggtgtcatgtaaagcatcaggttatacttttacctcctactggatgaactgggtgaggcaggctccaggacagggcctggagtggatgggaaggatcgacccctacgatagcgagacacactatgctcagaagctgcagggcagagtgaccatgaccacagacacctccacaagcaccgcctatatggagctgaggagcctgcggtctgacgataccgccgtgtactattgcgctcgcggcggctacgacttcgatgtgggcacactgtattggttctttgacgtgtggggccagggcaccacagtgaccgtgtccagcggtggtagcggcggcagtcctctgggactggcgggcggcagcggccggaagggaagtctttctggcagaagcgacaatcacggcggttccggaggttccctgagcatcgacaacgaggaggagatgaagttcctgagcatcatcagccctagcagctggatc

SEQ ID NO: 286 - DNA, 1641 bp, Artificial Sequence
  source: /note="Description of Artificial Sequence: Synthetic h1F3.5Fd- NKG2A_ScFv(L-H)_MC3_Acap2 sequence"
ggcggcagcggcggctccgaggtgcagctggtggagtccggcggcggcctggtgcagcccggcggcagcctgaggctgtcctgcgccgcctctggcttcacctttaacacatacgcaatgaattgggtgcgccaggcaccaggcaagggactggagtgggtggcccggatcagaagcaagtacaacaattatgccacctactatgccgactccgtgaaggatcggtttaccatcagcagagacgattccaagaacacactgtatctgcagatgaatagcctgcgggccgaggatacagccgtgtactattgcgtgagacacggcaactttggcaattcttacgtgagctggttcgcctattggggccagggcaccatggtgacagtgtcctctgcctctaccaagggacctagcgtgttcccactggcacctagctccaagtctaccagcggaggcacagccgccctgggatgtctggtgaaggactactttccagagcccgtgacagtgtcctggaactctggcgccctgaccagcggagtgcacacattccctgccgtgctgcagtctagcggcctgtactccctgtcctctgtggtgaccgtgccaagctcctctctgggcacccagacatatatctgcaacgtgaatcacaagccctctaatacaaaggtggacaagagggtggagcctaagagctgccccccttgtggcggaggcggtagcgacatccagatgacacagtctccctcttccctgtctgcttccgtgggcgatagagtgacaatcacctgtcgcgccagcgagaacatctactcttatctggcttggtaccagcagaagcccggcaaggcccctaagctgctgatctataatgccaagacactggctgagggcgtgccttccaggttcagcggatctggatccggaaccgactttacactgaccatcagctctctgcagccagaggattttgccacatactattgccagcatcattacggaacaccaagaacattcggcgggggaacaaaagtggaaatcaagggcggaggcgggtctggaggtggagggagtggaggaggggggagcggtgggggaggtagccaggtccagctggtgcagtcaggagccgaggtgaagaagccaggggcatcagtcaaggtgtcatgtaaagcatcaggttatacttttacctcctactggatgaactgggtgaggcaggctccaggacagggcctggagtggatgggaaggatcgacccctacgatagcgagacacactatgctcagaagctgcagggcagagtgaccatgaccacagacacctccacaagcaccgcctatatggagctgaggagcctgcggtctgacgataccgccgtgtactattgcgctcgcggcggctacgacttcgatgtgggcacactgtattggttctttgacgtgtggggccagggcaccacagtgaccgtgtccagcggtggtagcggcggcagtcctctgggactggcgggcggcagcggccggaagggaagtctttctggcagaagcgacaatcacggcggttccggaggttccaacgccgagctgaactgcgccgtgctgcaagtgaacagactgaagagcgctcagtgcggc

SEQ ID NO: 287 - DNA, 1701 bp, Artificial Sequence
  source: /note="Description of Artificial Sequence: Synthetic h1F3.5Fd- NKG2A_ScFv(L-H)_MC3_Acap3 sequence"
ggcggcagcggcggctccgaggtgcagctggtggagtccggcggcggcctggtgcagcccggcggcagcctgaggctgtcctgcgccgcctctggcttcacctttaacacatacgcaatgaattgggtgcgccaggcaccaggcaagggactggagtgggtggcccggatcagaagcaagtacaacaattatgccacctactatgccgactccgtgaaggatcggtttaccatcagcagagacgattccaagaacacactgtatctgcagatgaatagcctgcgggccgaggatacagccgtgtactattgcgtgagacacggcaactttggcaattcttacgtgagctggttcgcctattggggccagggcaccatggtgacagtgtcctctgcctctaccaagggacctagcgtgttcccactggcacctagctccaagtctaccagcggaggcacagccgccctgggatgtctggtgaaggactactttccagagcccgtgacagtgtcctggaactctggcgccctgaccagcggagtgcacacattccctgccgtgctgcagtctagcggcctgtactccctgtcctctgtggtgaccgtgccaagctcctctctgggcacccagacatatatctgcaacgtgaatcacaagccctctaatacaaaggtggacaagagggtggagcctaagagctgccccccttgtggcggaggcggtagcgacatccagatgacacagtctccctcttccctgtctgcttccgtgggcgatagagtgacaatcacctgtcgcgccagcgagaacatctactcttatctggcttggtaccagcagaagcccggcaaggcccctaagctgctgatctataatgccaagacactggctgagggcgtgccttccaggttcagcggatctggatccggaaccgactttacactgaccatcagctctctgcagccagaggattttgccacatactattgccagcatcattacggaacaccaagaacattcggcgggggaacaaaagtggaaatcaagggcggaggcgggtctggaggtggagggagtggaggaggggggagcggtgggggaggtagccaggtccagctggtgcagtcaggagccgaggtgaagaagccaggggcatcagtcaaggtgtcatgtaaagcatcaggttatacttttacctcctactggatgaactgggtgaggcaggctccaggacagggcctggagtggatgggaaggatcgacccctacgatagcgagacacactatgctcagaagctgcagggcagagtgaccatgaccacagacacctccacaagcaccgcctatatggagctgaggagcctgcggtctgacgataccgccgtgtactattgcgctcgcggcggctacgacttcgatgtgggcacactgtattggttctttgacgtgtggggccagggcaccacagtgaccgtgtccagcggtggtagcggcggcagtcctctgggactggcgggcggcagcggccggaagggaagtctttctggcagaagcgacaatcacggcggttccggaggttccctgagcatcgacaacgaggaggagatgaagttcctgagcatcatcagccctagcagctggatcggcgtgttcaactgcgccgtgctgcaagtgaacagactgaagagcgctcagtgcggc

SEQ ID NO: 288 - DNA, 1671 bp, Artificial Sequence
  source: /note="Description of Artificial Sequence: Synthetic h1F3.5Fd- NKG2A_ScFv(L-H)_MC3_Acap4 sequence"
ggcggcagcggcggctccgaggtgcagctggtggagtccggcggcggcctggtgcagcccggcggcagcctgaggctgtcctgcgccgcctctggcttcacctttaacacatacgcaatgaattgggtgcgccaggcaccaggcaagggactggagtgggtggcccggatcagaagcaagtacaacaattatgccacctactatgccgactccgtgaaggatcggtttaccatcagcagagacgattccaagaacacactgtatctgcagatgaatagcctgcgggccgaggatacagccgtgtactattgcgtgagacacggcaactttggcaattcttacgtgagctggttcgcctattggggccagggcaccatggtgacagtgtcctctgcctctaccaagggacctagcgtgttcccactggcacctagctccaagtctaccagcggaggcacagccgccctgggatgtctggtgaaggactactttccagagcccgtgacagtgtcctggaactctggcgccctgaccagcggagtgcacacattccctgccgtgctgcagtctagcggcctgtactccctgtcctctgtggtgaccgtgccaagctcctctctgggcacccagacatatatctgcaacgtgaatcacaagccctctaatacaaaggtggacaagagggtggagcctaagagctgccccccttgtggcggaggcggtagcgacatccagatgacacagtctccctcttccctgtctgcttccgtgggcgatagagtgacaatcacctgtcgcgccagcgagaacatctactcttatctggcttggtaccagcagaagcccggcaaggcccctaagctgctgatctataatgccaagacactggctgagggcgtgccttccaggttcagcggatctggatccggaaccgactttacactgaccatcagctctctgcagccagaggattttgccacatactattgccagcatcattacggaacaccaagaacattcggcgggggaacaaaagtggaaatcaagggcggaggcgggtctggaggtggagggagtggaggaggggggagcggtgggggaggtagccaggtccagctggtgcagtcaggagccgaggtgaagaagccaggggcatcagtcaaggtgtcatgtaaagcatcaggttatacttttacctcctactggatgaactgggtgaggcaggctccaggacagggcctggagtggatgggaaggatcgacccctacgatagcgagacacactatgctcagaagctgcagggcagagtgaccatgaccacagacacctccacaagcaccgcctatatggagctgaggagcctgcggtctgacgataccgccgtgtactattgcgctcgcggcggctacgacttcgatgtgggcacactgtattggttctttgacgtgtggggccagggcaccacagtgaccgtgtccagcggtggtagcggcggcagtcctctgggactggcgggcggcagcggccggaagggaagtctttctggcagaagcgacaatcacggcggttccggaggttccgccttcaagcacgagatcaaggacagcgacaacgccgagctgaactgcgccgtgctgcaagtgaacagactgaagagcgctcagtgcggc

SEQ ID NO: 289 - DNA, 3390 bp, Artificial Sequence
  source: /note="Description of Artificial Sequence: Synthetic CD3cap137-ALB-MC2-hF3.5Fd-NKG2A sequence"
caggacggcaacgaggagatgggcggcatcacccagacaccatacaaggtgagcatctccggcaccacagtgatcctgaccggaggaggcagcggaggaggctccggaggcggctctgaggtggcccacaggttcaaggatctgggcgaggagaacttcaaggccctggtgctgatcgccttcgcccagtatctgcagcagtgcccctttgaggaccacgtgaagctggtgaacgaggtgaccgagttcgccaagacatgcgtggccgacgagtccgccgagaattgtgataagtctctgcacaccctgtttggcgataagctgtgcaccgtggccacactgagggagacatacggcgagatggccgactgctgtgccaagcaggagcccgagcgcaacgagtgcttcctgcagcacaaggacgataaccctaatctgccacggctggtgagacctgaggtggacgtgatgtgcaccgccttccacgataatgaggagacatttctgaagaagtacctgtatgagatcgcccggagacacccttacttttatgccccagagctgctgttctttgccaagcggtacaaggcagccttcaccgagtgctgtcaggcagcagataaggcagcatgcctgctgccaaagctggacgagctgagggatgagggcaaggcaagctccgccaagcagcgcctgaagtgtgcaagcctgcagaagttcggagagagggcctttaaggcatgggcagtggcaaggctgtcccagcggttcccaaaggccgagtttgccgaggtgtctaagctggtgaccgacctgacaaaggtgcacaccgagtgctgtcacggcgacctgctggagtgcgcagacgatagagccgatctggccaagtacatctgtgagaaccaggactctatctctagcaagctgaaggagtgctgtgagaagcccctgctggagaagtcccactgcatcgccgaggtggagaacgacgagatgccagcagatctgccaagcctggcagcagacttcgtggagtccaaggacgtgtgcaagaattacgccgaggccaaggacgtgttcctgggcatgtttctgtacgagtatgccaggcgccaccctgactactccgtggtgctgctgctgcggctggccaagacctatgagaccacactggagaagtgctgtgccgccgccgacccccacgagtgctatgcaaaggtgttcgacgagtttaagcccctggtggaggagcctcagaacctgatcaagcagaattgtgagctgtttgagcagctgggcgagtacaagttccagaacgccctgctggtgagatataccaagaaggtgccacaggtgtctacccccacactggtggaggtgagccggaatctgggcaaggtcggctccaagtgctgtaagcaccctgaggccaagagaatgccatgcgccgaggattacctgtccgtggtgctgaaccagctgtgcgtgctgcacgagaagacccccgtgagcgacagggtgaccaagtgctgtacagagtctctggtgaaccggagaccatgctttagcgccctggaggtggatgagacatatgtgcccaaggagttcaatgccgagaccttcacatttcacgccgacatctgtaccctgagcgagaaggagcgccagatcaagaagcagacagccctggtggagctggtgaagcacaagccaaaggccaccaaggagcagctgaaggccgtgatggacgatttcgccgcctttgtggagaagtgctgtaaggccgacgataaggagacatgcttcgcagaggagggcaagaagctggtggcagcaagccaggcagcaggaggctccggcggctctccactgggcctggccggcctgagcggccggagcgacaaccacggcggcagcggcggctccgaggtgcagctggtggagtccggcggcggcctggtgcagcccggcggcagcctgaggctgtcctgcgccgcctctggcttcacctttaacacatacgcaatgaattgggtgcgccaggcaccaggcaagggactggagtgggtggcccggatcagaagcaagtacaacaattatgccacctactatgccgactccgtgaaggatcggtttaccatcagcagagacgattccaagaacacactgtatctgcagatgaatagcctgcgggccgaggatacagccgtgtactattgcgtgagacacggcaactttggcaattcttacgtgagctggttcgcctattggggccagggcaccatggtgacagtgtcctctgcctctaccaagggacctagcgtgttcccactggcacctagctccaagtctaccagcggaggcacagccgccctgggatgtctggtgaaggactactttccagagcccgtgacagtgtcctggaactctggcgccctgaccagcggagtgcacacattccctgccgtgctgcagtctagcggcctgtactccctgtcctctgtggtgaccgtgccaagctcctctctgggcacccagacatatatctgcaacgtgaatcacaagccctctaatacaaaggtggacaagagggtggagcctaagagctgccccccttgtggcggaggcggtagcgacatccagatgacacagtctccctcttccctgtctgcttccgtgggcgatagagtgacaatcacctgtcgcgccagcgagaacatctactcttatctggcttggtaccagcagaagcccggcaaggcccctaagctgctgatctataatgccaagacactggctgagggcgtgccttccaggttcagcggatctggatccggaaccgactttacactgaccatcagctctctgcagccagaggattttgccacatactattgccagcatcattacggaacaccaagaacattcggcgggggaacaaaagtggaaatcaagggcggaggcgggtctggaggtggagggagtggaggaggggggagcggtgggggaggtagccaggtccagctggtgcagtcaggagccgaggtgaagaagccaggggcatcagtcaaggtgtcatgtaaagcatcaggttatacttttacctcctactggatgaactgggtgaggcaggctccaggacagggcctggagtggatgggaaggatcgacccctacgatagcgagacacactatgctcagaagctgcagggcagagtgaccatgaccacagacacctccacaagcaccgcctatatggagctgaggagcctgcggtctgacgataccgccgtgtactattgcgctcgcggcggctacgacttcgatgtgggcacactgtattggttctttgacgtgtggggccagggcaccacagtgaccgtgtccagc

SEQ ID NO: 290 - DNA, 3390 bp, Artificial Sequence
  source: /note="Description of Artificial Sequence: Synthetic CD3cap116-ALB-MC2-hF3.5Fd-NKG2A sequence"
caggacggccaggaggagatgggcggcatcacccagacaccatacaaggtgagcatctccggcaccacagtgatcctgaccggaggaggcagcggaggaggctccggaggcggctctgaggtggcccacaggttcaaggatctgggcgaggagaacttcaaggccctggtgctgatcgccttcgcccagtatctgcagcagtgcccctttgaggaccacgtgaagctggtgaacgaggtgaccgagttcgccaagacatgcgtggccgacgagtccgccgagaattgtgataagtctctgcacaccctgtttggcgataagctgtgcaccgtggccacactgagggagacatacggcgagatggccgactgctgtgccaagcaggagcccgagcgcaacgagtgcttcctgcagcacaaggacgataaccctaatctgccacggctggtgagacctgaggtggacgtgatgtgcaccgccttccacgataatgaggagacatttctgaagaagtacctgtatgagatcgcccggagacacccttacttttatgccccagagctgctgttctttgccaagcggtacaaggcagccttcaccgagtgctgtcaggcagcagataaggcagcatgcctgctgccaaagctggacgagctgagggatgagggcaaggcaagctccgccaagcagcgcctgaagtgtgcaagcctgcagaagttcggagagagggcctttaaggcatgggcagtggcaaggctgtcccagcggttcccaaaggccgagtttgccgaggtgtctaagctggtgaccgacctgacaaaggtgcacaccgagtgctgtcacggcgacctgctggagtgcgcagacgatagagccgatctggccaagtacatctgtgagaaccaggactctatctctagcaagctgaaggagtgctgtgagaagcccctgctggagaagtcccactgcatcgccgaggtggagaacgacgagatgccagcagatctgccaagcctggcagcagacttcgtggagtccaaggacgtgtgcaagaattacgccgaggccaaggacgtgttcctgggcatgtttctgtacgagtatgccaggcgccaccctgactactccgtggtgctgctgctgcggctggccaagacctatgagaccacactggagaagtgctgtgccgccgccgacccccacgagtgctatgcaaaggtgttcgacgagtttaagcccctggtggaggagcctcagaacctgatcaagcagaattgtgagctgtttgagcagctgggcgagtacaagttccagaacgccctgctggtgagatataccaagaaggtgccacaggtgtctacccccacactggtggaggtgagccggaatctgggcaaggtcggctccaagtgctgtaagcaccctgaggccaagagaatgccatgcgccgaggattacctgtccgtggtgctgaaccagctgtgcgtgctgcacgagaagacccccgtgagcgacagggtgaccaagtgctgtacagagtctctggtgaaccggagaccatgctttagcgccctggaggtggatgagacatatgtgcccaaggagttcaatgccgagaccttcacatttcacgccgacatctgtaccctgagcgagaaggagcgccagatcaagaagcagacagccctggtggagctggtgaagcacaagccaaaggccaccaaggagcagctgaaggccgtgatggacgatttcgccgcctttgtggagaagtgctgtaaggccgacgataaggagacatgcttcgcagaggagggcaagaagctggtggcagcaagccaggcagcaggaggctccggcggctctccactgggcctggccggcctgagcggccggagcgacaaccacggcggcagcggcggctccgaggtgcagctggtggagtccggcggcggcctggtgcagcccggcggcagcctgaggctgtcctgcgccgcctctggcttcacctttaacacatacgcaatgaattgggtgcgccaggcaccaggcaagggactggagtgggtggcccggatcagaagcaagtacaacaattatgccacctactatgccgactccgtgaaggatcggtttaccatcagcagagacgattccaagaacacactgtatctgcagatgaatagcctgcgggccgaggatacagccgtgtactattgcgtgagacacggcaactttggcaattcttacgtgagctggttcgcctattggggccagggcaccatggtgacagtgtcctctgcctctaccaagggacctagcgtgttcccactggcacctagctccaagtctaccagcggaggcacagccgccctgggatgtctggtgaaggactactttccagagcccgtgacagtgtcctggaactctggcgccctgaccagcggagtgcacacattccctgccgtgctgcagtctagcggcctgtactccctgtcctctgtggtgaccgtgccaagctcctctctgggcacccagacatatatctgcaacgtgaatcacaagccctctaatacaaaggtggacaagagggtggagcctaagagctgccccccttgtggcggaggcggtagcgacatccagatgacacagtctccctcttccctgtctgcttccgtgggcgatagagtgacaatcacctgtcgcgccagcgagaacatctactcttatctggcttggtaccagcagaagcccggcaaggcccctaagctgctgatctataatgccaagacactggctgagggcgtgccttccaggttcagcggatctggatccggaaccgactttacactgaccatcagctctctgcagccagaggattttgccacatactattgccagcatcattacggaacaccaagaacattcggcgggggaacaaaagtggaaatcaagggcggaggcgggtctggaggtggagggagtggaggaggggggagcggtgggggaggtagccaggtccagctggtgcagtcaggagccgaggtgaagaagccaggggcatcagtcaaggtgtcatgtaaagcatcaggttatacttttacctcctactggatgaactgggtgaggcaggctccaggacagggcctggagtggatgggaaggatcgacccctacgatagcgagacacactatgctcagaagctgcagggcagagtgaccatgaccacagacacctccacaagcaccgcctatatggagctgaggagcctgcggtctgacgataccgccgtgtactattgcgctcgcggcggctacgacttcgatgtgggcacactgtattggttctttgacgtgtggggccagggcaccacagtgaccgtgtccagc

SEQ ID NO: 291 - DNA, 3396 bp, Artificial Sequence
  source: /note="Description of Artificial Sequence: Synthetic CD3cap118-ALB-MC2-hF3.5Fd-NKG2A sequence"
accggcctggacggccaggaggagctgggcggcatcacccagacaccatacaaggtgagcatctccggcaccacagtgatcctgaccggaggaggcagcggaggaggctccggaggcggctctgaggtggcccacaggttcaaggatctgggcgaggagaacttcaaggccctggtgctgatcgccttcgcccagtatctgcagcagtgcccctttgaggaccacgtgaagctggtgaacgaggtgaccgagttcgccaagacatgcgtggccgacgagtccgccgagaattgtgataagtctctgcacaccctgtttggcgataagctgtgcaccgtggccacactgagggagacatacggcgagatggccgactgctgtgccaagcaggagcccgagcgcaacgagtgcttcctgcagcacaaggacgataaccctaatctgccacggctggtgagacctgaggtggacgtgatgtgcaccgccttccacgataatgaggagacatttctgaagaagtacctgtatgagatcgcccggagacacccttacttttatgccccagagctgctgttctttgccaagcggtacaaggcagccttcaccgagtgctgtcaggcagcagataaggcagcatgcctgctgccaaagctggacgagctgagggatgagggcaaggcaagctccgccaagcagcgcctgaagtgtgcaagcctgcagaagttcggagagagggcctttaaggcatgggcagtggcaaggctgtcccagcggttcccaaaggccgagtttgccgaggtgtctaagctggtgaccgacctgacaaaggtgcacaccgagtgctgtcacggcgacctgctggagtgcgcagacgatagagccgatctggccaagtacatctgtgagaaccaggactctatctctagcaagctgaaggagtgctgtgagaagcccctgctggagaagtcccactgcatcgccgaggtggagaacgacgagatgccagcagatctgccaagcctggcagcagacttcgtggagtccaaggacgtgtgcaagaattacgccgaggccaaggacgtgttcctgggcatgtttctgtacgagtatgccaggcgccaccctgactactccgtggtgctgctgctgcggctggccaagacctatgagaccacactggagaagtgctgtgccgccgccgacccccacgagtgctatgcaaaggtgttcgacgagtttaagcccctggtggaggagcctcagaacctgatcaagcagaattgtgagctgtttgagcagctgggcgagtacaagttccagaacgccctgctggtgagatataccaagaaggtgccacaggtgtctacccccacactggtggaggtgagccggaatctgggcaaggtcggctccaagtgctgtaagcaccctgaggccaagagaatgccatgcgccgaggattacctgtccgtggtgctgaaccagctgtgcgtgctgcacgagaagacccccgtgagcgacagggtgaccaagtgctgtacagagtctctggtgaaccggagaccatgctttagcgccctggaggtggatgagacatatgtgcccaaggagttcaatgccgagaccttcacatttcacgccgacatctgtaccctgagcgagaaggagcgccagatcaagaagcagacagccctggtggagctggtgaagcacaagccaaaggccaccaaggagcagctgaaggccgtgatggacgatttcgccgcctttgtggagaagtgctgtaaggccgacgataaggagacatgcttcgcagaggagggcaagaagctggtggcagcaagccaggcagcaggaggctccggcggctctccactgggcctggccggcctgagcggccggagcgacaaccacggcggcagcggcggctccgaggtgcagctggtggagtccggcggcggcctggtgcagcccggcggcagcctgaggctgtcctgcgccgcctctggcttcacctttaacacatacgcaatgaattgggtgcgccaggcaccaggcaagggactggagtgggtggcccggatcagaagcaagtacaacaattatgccacctactatgccgactccgtgaaggatcggtttaccatcagcagagacgattccaagaacacactgtatctgcagatgaatagcctgcgggccgaggatacagccgtgtactattgcgtgagacacggcaactttggcaattcttacgtgagctggttcgcctattggggccagggcaccatggtgacagtgtcctctgcctctaccaagggacctagcgtgttcccactggcacctagctccaagtctaccagcggaggcacagccgccctgggatgtctggtgaaggactactttccagagcccgtgacagtgtcctggaactctggcgccctgaccagcggagtgcacacattccctgccgtgctgcagtctagcggcctgtactccctgtcctctgtggtgaccgtgccaagctcctctctgggcacccagacatatatctgcaacgtgaatcacaagccctctaatacaaaggtggacaagagggtggagcctaagagctgccccccttgtggcggaggcggtagcgacatccagatgacacagtctccctcttccctgtctgcttccgtgggcgatagagtgacaatcacctgtcgcgccagcgagaacatctactcttatctggcttggtaccagcagaagcccggcaaggcccctaagctgctgatctataatgccaagacactggctgagggcgtgccttccaggttcagcggatctggatccggaaccgactttacactgaccatcagctctctgcagccagaggattttgccacatactattgccagcatcattacggaacaccaagaacattcggcgggggaacaaaagtggaaatcaagggcggaggcgggtctggaggtggagggagtggaggaggggggagcggtgggggaggtagccaggtccagctggtgcagtcaggagccgaggtgaagaagccaggggcatcagtcaaggtgtcatgtaaagcatcaggttatacttttacctcctactggatgaactgggtgaggcaggctccaggacagggcctggagtggatgggaaggatcgacccctacgatagcgagacacactatgctcagaagctgcagggcagagtgaccatgaccacagacacctccacaagcaccgcctatatggagctgaggagcctgcggtctgacgataccgccgtgtactattgcgctcgcggcggctacgacttcgatgtgggcacactgtattggttctttgacgtgtggggccagggcaccacagtgaccgtgtccagc

SEQ ID NO: 292 - DNA, 3390 bp, Artificial Sequence
  source: /note="Description of Artificial Sequence: Synthetic CD3cap105-ALB-MC2-hF3.5Fd-NKG2A sequence"
caggacggcaccgagaagatgggcggcatcacccagacaccatacaaggtgagcatctccggcaccacagtgatcctgaccggaggaggcagcggaggaggctccggaggcggctctgaggtggcccacaggttcaaggatctgggcgaggagaacttcaaggccctggtgctgatcgccttcgcccagtatctgcagcagtgcccctttgaggaccacgtgaagctggtgaacgaggtgaccgagttcgccaagacatgcgtggccgacgagtccgccgagaattgtgataagtctctgcacaccctgtttggcgataagctgtgcaccgtggccacactgagggagacatacggcgagatggccgactgctgtgccaagcaggagcccgagcgcaacgagtgcttcctgcagcacaaggacgataaccctaatctgccacggctggtgagacctgaggtggacgtgatgtgcaccgccttccacgataatgaggagacatttctgaagaagtacctgtatgagatcgcccggagacacccttacttttatgccccagagctgctgttctttgccaagcggtacaaggcagccttcaccgagtgctgtcaggcagcagataaggcagcatgcctgctgccaaagctggacgagctgagggatgagggcaaggcaagctccgccaagcagcgcctgaagtgtgcaagcctgcagaagttcggagagagggcctttaaggcatgggcagtggcaaggctgtcccagcggttcccaaaggccgagtttgccgaggtgtctaagctggtgaccgacctgacaaaggtgcacaccgagtgctgtcacggcgacctgctggagtgcgcagacgatagagccgatctggccaagtacatctgtgagaaccaggactctatctctagcaagctgaaggagtgctgtgagaagcccctgctggagaagtcccactgcatcgccgaggtggagaacgacgagatgccagcagatctgccaagcctggcagcagacttcgtggagtccaaggacgtgtgcaagaattacgccgaggccaaggacgtgttcctgggcatgtttctgtacgagtatgccaggcgccaccctgactactccgtggtgctgctgctgcggctggccaagacctatgagaccacactggagaagtgctgtgccgccgccgacccccacgagtgctatgcaaaggtgttcgacgagtttaagcccctggtggaggagcctcagaacctgatcaagcagaattgtgagctgtttgagcagctgggcgagtacaagttccagaacgccctgctggtgagatataccaagaaggtgccacaggtgtctacccccacactggtggaggtgagccggaatctgggcaaggtcggctccaagtgctgtaagcaccctgaggccaagagaatgccatgcgccgaggattacctgtccgtggtgctgaaccagctgtgcgtgctgcacgagaagacccccgtgagcgacagggtgaccaagtgctgtacagagtctctggtgaaccggagaccatgctttagcgccctggaggtggatgagacatatgtgcccaaggagttcaatgccgagaccttcacatttcacgccgacatctgtaccctgagcgagaaggagcgccagatcaagaagcagacagccctggtggagctggtgaagcacaagccaaaggccaccaaggagcagctgaaggccgtgatggacgatttcgccgcctttgtggagaagtgctgtaaggccgacgataaggagacatgcttcgcagaggagggcaagaagctggtggcagcaagccaggcagcaggaggctccggcggctctccactgggcctggccggcctgagcggccggagcgacaaccacggcggcagcggcggctccgaggtgcagctggtggagtccggcggcggcctggtgcagcccggcggcagcctgaggctgtcctgcgccgcctctggcttcacctttaacacatacgcaatgaattgggtgcgccaggcaccaggcaagggactggagtgggtggcccggatcagaagcaagtacaacaattatgccacctactatgccgactccgtgaaggatcggtttaccatcagcagagacgattccaagaacacactgtatctgcagatgaatagcctgcgggccgaggatacagccgtgtactattgcgtgagacacggcaactttggcaattcttacgtgagctggttcgcctattggggccagggcaccatggtgacagtgtcctctgcctctaccaagggacctagcgtgttcccactggcacctagctccaagtctaccagcggaggcacagccgccctgggatgtctggtgaaggactactttccagagcccgtgacagtgtcctggaactctggcgccctgaccagcggagtgcacacattccctgccgtgctgcagtctagcggcctgtactccctgtcctctgtggtgaccgtgccaagctcctctctgggcacccagacatatatctgcaacgtgaatcacaagccctctaatacaaaggtggacaagagggtggagcctaagagctgccccccttgtggcggaggcggtagcgacatccagatgacacagtctccctcttccctgtctgcttccgtgggcgatagagtgacaatcacctgtcgcgccagcgagaacatctactcttatctggcttggtaccagcagaagcccggcaaggcccctaagctgctgatctataatgccaagacactggctgagggcgtgccttccaggttcagcggatctggatccggaaccgactttacactgaccatcagctctctgcagccagaggattttgccacatactattgccagcatcattacggaacaccaagaacattcggcgggggaacaaaagtggaaatcaagggcggaggcgggtctggaggtggagggagtggaggaggggggagcggtgggggaggtagccaggtccagctggtgcagtcaggagccgaggtgaagaagccaggggcatcagtcaaggtgtcatgtaaagcatcaggttatacttttacctcctactggatgaactgggtgaggcaggctccaggacagggcctggagtggatgggaaggatcgacccctacgatagcgagacacactatgctcagaagctgcagggcagagtgaccatgaccacagacacctccacaagcaccgcctatatggagctgaggagcctgcggtctgacgataccgccgtgtactattgcgctcgcggcggctacgacttcgatgtgggcacactgtattggttctttgacgtgtggggccagggcaccacagtgaccgtgtccagc

SEQ ID NO: 293 - DNA, 3411 bp, Artificial Sequence
  source: /note="Description of Artificial Sequence: Synthetic CD3cap137-ALB-MC3-hF3.5Fd-NKG2A sequence"
caggacggcaacgaggagatgggcggcatcacccagacaccatacaaggtgagcatctccggcaccacagtgatcctgaccggaggaggcagcggaggaggctccggaggcggctctgaggtggcccacaggttcaaggatctgggcgaggagaacttcaaggccctggtgctgatcgccttcgcccagtatctgcagcagtgcccctttgaggaccacgtgaagctggtgaacgaggtgaccgagttcgccaagacatgcgtggccgacgagtccgccgagaattgtgataagtctctgcacaccctgtttggcgataagctgtgcaccgtggccacactgagggagacatacggcgagatggccgactgctgtgccaagcaggagcccgagcgcaacgagtgcttcctgcagcacaaggacgataaccctaatctgccacggctggtgagacctgaggtggacgtgatgtgcaccgccttccacgataatgaggagacatttctgaagaagtacctgtatgagatcgcccggagacacccttacttttatgccccagagctgctgttctttgccaagcggtacaaggcagccttcaccgagtgctgtcaggcagcagataaggcagcatgcctgctgccaaagctggacgagctgagggatgagggcaaggcaagctccgccaagcagcgcctgaagtgtgcaagcctgcagaagttcggagagagggcctttaaggcatgggcagtggcaaggctgtcccagcggttcccaaaggccgagtttgccgaggtgtctaagctggtgaccgacctgacaaaggtgcacaccgagtgctgtcacggcgacctgctggagtgcgcagacgatagagccgatctggccaagtacatctgtgagaaccaggactctatctctagcaagctgaaggagtgctgtgagaagcccctgctggagaagtcccactgcatcgccgaggtggagaacgacgagatgccagcagatctgccaagcctggcagcagacttcgtggagtccaaggacgtgtgcaagaattacgccgaggccaaggacgtgttcctgggcatgtttctgtacgagtatgccaggcgccaccctgactactccgtggtgctgctgctgcggctggccaagacctatgagaccacactggagaagtgctgtgccgccgccgacccccacgagtgctatgcaaaggtgttcgacgagtttaagcccctggtggaggagcctcagaacctgatcaagcagaattgtgagctgtttgagcagctgggcgagtacaagttccagaacgccctgctggtgagatataccaagaaggtgccacaggtgtctacccccacactggtggaggtgagccggaatctgggcaaggtcggctccaagtgctgtaagcaccctgaggccaagagaatgccatgcgccgaggattacctgtccgtggtgctgaaccagctgtgcgtgctgcacgagaagacccccgtgagcgacagggtgaccaagtgctgtacagagtctctggtgaaccggagaccatgctttagcgccctggaggtggatgagacatatgtgcccaaggagttcaatgccgagaccttcacatttcacgccgacatctgtaccctgagcgagaaggagcgccagatcaagaagcagacagccctggtggagctggtgaagcacaagccaaaggccaccaaggagcagctgaaggccgtgatggacgatttcgccgcctttgtggagaagtgctgtaaggccgacgataaggagacatgcttcgcagaggagggcaagaagctggtggcagcaagccaggcagcaggtggtagcggcggcagtcctctgggactggcgggcggcagcggccggaagggaagtctttctggcagaagcgacaatcacggcggttccggaggttccgaggtgcagctggtggagtccggcggcggcctggtgcagcccggcggcagcctgaggctgtcctgcgccgcctctggcttcacctttaacacatacgcaatgaattgggtgcgccaggcaccaggcaagggactggagtgggtggcccggatcagaagcaagtacaacaattatgccacctactatgccgactccgtgaaggatcggtttaccatcagcagagacgattccaagaacacactgtatctgcagatgaatagcctgcgggccgaggatacagccgtgtactattgcgtgagacacggcaactttggcaattcttacgtgagctggttcgcctattggggccagggcaccatggtgacagtgtcctctgcctctaccaagggacctagcgtgttcccactggcacctagctccaagtctaccagcggaggcacagccgccctgggatgtctggtgaaggactactttccagagcccgtgacagtgtcctggaactctggcgccctgaccagcggagtgcacacattccctgccgtgctgcagtctagcggcctgtactccctgtcctctgtggtgaccgtgccaagctcctctctgggcacccagacatatatctgcaacgtgaatcacaagccctctaatacaaaggtggacaagagggtggagcctaagagctgccccccttgtggcggaggcggtagcgacatccagatgacacagtctccctcttccctgtctgcttccgtgggcgatagagtgacaatcacctgtcgcgccagcgagaacatctactcttatctggcttggtaccagcagaagcccggcaaggcccctaagctgctgatctataatgccaagacactggctgagggcgtgccttccaggttcagcggatctggatccggaaccgactttacactgaccatcagctctctgcagccagaggattttgccacatactattgccagcatcattacggaacaccaagaacattcggcgggggaacaaaagtggaaatcaagggcggaggcgggtctggaggtggagggagtggaggaggggggagcggtgggggaggtagccaggtccagctggtgcagtcaggagccgaggtgaagaagccaggggcatcagtcaaggtgtcatgtaaagcatcaggttatacttttacctcctactggatgaactgggtgaggcaggctccaggacagggcctggagtggatgggaaggatcgacccctacgatagcgagacacactatgctcagaagctgcagggcagagtgaccatgaccacagacacctccacaagcaccgcctatatggagctgaggagcctgcggtctgacgataccgccgtgtactattgcgctcgcggcggctacgacttcgatgtgggcacactgtattggttctttgacgtgtggggccagggcaccacagtgaccgtgtccagc

SEQ ID NO: 294 - DNA, 3411 bp, Artificial Sequence
  source: /note="Description of Artificial Sequence: Synthetic CD3cap116-ALB-MC3-hF3.5Fd-NKG2A sequence"
caggacggccaggaggagatgggcggcatcacccagacaccatacaaggtgagcatctccggcaccacagtgatcctgaccggaggaggcagcggaggaggctccggaggcggctctgaggtggcccacaggttcaaggatctgggcgaggagaacttcaaggccctggtgctgatcgccttcgcccagtatctgcagcagtgcccctttgaggaccacgtgaagctggtgaacgaggtgaccgagttcgccaagacatgcgtggccgacgagtccgccgagaattgtgataagtctctgcacaccctgtttggcgataagctgtgcaccgtggccacactgagggagacatacggcgagatggccgactgctgtgccaagcaggagcccgagcgcaacgagtgcttcctgcagcacaaggacgataaccctaatctgccacggctggtgagacctgaggtggacgtgatgtgcaccgccttccacgataatgaggagacatttctgaagaagtacctgtatgagatcgcccggagacacccttacttttatgccccagagctgctgttctttgccaagcggtacaaggcagccttcaccgagtgctgtcaggcagcagataaggcagcatgcctgctgccaaagctggacgagctgagggatgagggcaaggcaagctccgccaagcagcgcctgaagtgtgcaagcctgcagaagttcggagagagggcctttaaggcatgggcagtggcaaggctgtcccagcggttcccaaaggccgagtttgccgaggtgtctaagctggtgaccgacctgacaaaggtgcacaccgagtgctgtcacggcgacctgctggagtgcgcagacgatagagccgatctggccaagtacatctgtgagaaccaggactctatctctagcaagctgaaggagtgctgtgagaagcccctgctggagaagtcccactgcatcgccgaggtggagaacgacgagatgccagcagatctgccaagcctggcagcagacttcgtggagtccaaggacgtgtgcaagaattacgccgaggccaaggacgtgttcctgggcatgtttctgtacgagtatgccaggcgccaccctgactactccgtggtgctgctgctgcggctggccaagacctatgagaccacactggagaagtgctgtgccgccgccgacccccacgagtgctatgcaaaggtgttcgacgagtttaagcccctggtggaggagcctcagaacctgatcaagcagaattgtgagctgtttgagcagctgggcgagtacaagttccagaacgccctgctggtgagatataccaagaaggtgccacaggtgtctacccccacactggtggaggtgagccggaatctgggcaaggtcggctccaagtgctgtaagcaccctgaggccaagagaatgccatgcgccgaggattacctgtccgtggtgctgaaccagctgtgcgtgctgcacgagaagacccccgtgagcgacagggtgaccaagtgctgtacagagtctctggtgaaccggagaccatgctttagcgccctggaggtggatgagacatatgtgcccaaggagttcaatgccgagaccttcacatttcacgccgacatctgtaccctgagcgagaaggagcgccagatcaagaagcagacagccctggtggagctggtgaagcacaagccaaaggccaccaaggagcagctgaaggccgtgatggacgatttcgccgcctttgtggagaagtgctgtaaggccgacgataaggagacatgcttcgcagaggagggcaagaagctggtggcagcaagccaggcagcaggtggtagcggcggcagtcctctgggactggcgggcggcagcggccggaagggaagtctttctggcagaagcgacaatcacggcggttccggaggttccgaggtgcagctggtggagtccggcggcggcctggtgcagcccggcggcagcctgaggctgtcctgcgccgcctctggcttcacctttaacacatacgcaatgaattgggtgcgccaggcaccaggcaagggactggagtgggtggcccggatcagaagcaagtacaacaattatgccacctactatgccgactccgtgaaggatcggtttaccatcagcagagacgattccaagaacacactgtatctgcagatgaatagcctgcgggccgaggatacagccgtgtactattgcgtgagacacggcaactttggcaattcttacgtgagctggttcgcctattggggccagggcaccatggtgacagtgtcctctgcctctaccaagggacctagcgtgttcccactggcacctagctccaagtctaccagcggaggcacagccgccctgggatgtctggtgaaggactactttccagagcccgtgacagtgtcctggaactctggcgccctgaccagcggagtgcacacattccctgccgtgctgcagtctagcggcctgtactccctgtcctctgtggtgaccgtgccaagctcctctctgggcacccagacatatatctgcaacgtgaatcacaagccctctaatacaaaggtggacaagagggtggagcctaagagctgccccccttgtggcggaggcggtagcgacatccagatgacacagtctccctcttccctgtctgcttccgtgggcgatagagtgacaatcacctgtcgcgccagcgagaacatctactcttatctggcttggtaccagcagaagcccggcaaggcccctaagctgctgatctataatgccaagacactggctgagggcgtgccttccaggttcagcggatctggatccggaaccgactttacactgaccatcagctctctgcagccagaggattttgccacatactattgccagcatcattacggaacaccaagaacattcggcgggggaacaaaagtggaaatcaagggcggaggcgggtctggaggtggagggagtggaggaggggggagcggtgggggaggtagccaggtccagctggtgcagtcaggagccgaggtgaagaagccaggggcatcagtcaaggtgtcatgtaaagcatcaggttatacttttacctcctactggatgaactgggtgaggcaggctccaggacagggcctggagtggatgggaaggatcgacccctacgatagcgagacacactatgctcagaagctgcagggcagagtgaccatgaccacagacacctccacaagcaccgcctatatggagctgaggagcctgcggtctgacgataccgccgtgtactattgcgctcgcggcggctacgacttcgatgtgggcacactgtattggttctttgacgtgtggggccagggcaccacagtgaccgtgtccagc

SEQ ID NO: 295 - DNA, 3417 bp, Artificial Sequence
  source: /note="Description of Artificial Sequence: Synthetic CD3cap118-ALB-MC3-hF3.5Fd-NKG2A sequence"
accggcctggacggccaggaggagctgggcggcatcacccagacaccatacaaggtgagcatctccggcaccacagtgatcctgaccggaggaggcagcggaggaggctccggaggcggctctgaggtggcccacaggttcaaggatctgggcgaggagaacttcaaggccctggtgctgatcgccttcgcccagtatctgcagcagtgcccctttgaggaccacgtgaagctggtgaacgaggtgaccgagttcgccaagacatgcgtggccgacgagtccgccgagaattgtgataagtctctgcacaccctgtttggcgataagctgtgcaccgtggccacactgagggagacatacggcgagatggccgactgctgtgccaagcaggagcccgagcgcaacgagtgcttcctgcagcacaaggacgataaccctaatctgccacggctggtgagacctgaggtggacgtgatgtgcaccgccttccacgataatgaggagacatttctgaagaagtacctgtatgagatcgcccggagacacccttacttttatgccccagagctgctgttctttgccaagcggtacaaggcagccttcaccgagtgctgtcaggcagcagataaggcagcatgcctgctgccaaagctggacgagctgagggatgagggcaaggcaagctccgccaagcagcgcctgaagtgtgcaagcctgcagaagttcggagagagggcctttaaggcatgggcagtggcaaggctgtcccagcggttcccaaaggccgagtttgccgaggtgtctaagctggtgaccgacctgacaaaggtgcacaccgagtgctgtcacggcgacctgctggagtgcgcagacgatagagccgatctggccaagtacatctgtgagaaccaggactctatctctagcaagctgaaggagtgctgtgagaagcccctgctggagaagtcccactgcatcgccgaggtggagaacgacgagatgccagcagatctgccaagcctggcagcagacttcgtggagtccaaggacgtgtgcaagaattacgccgaggccaaggacgtgttcctgggcatgtttctgtacgagtatgccaggcgccaccctgactactccgtggtgctgctgctgcggctggccaagacctatgagaccacactggagaagtgctgtgccgccgccgacccccacgagtgctatgcaaaggtgttcgacgagtttaagcccctggtggaggagcctcagaacctgatcaagcagaattgtgagctgtttgagcagctgggcgagtacaagttccagaacgccctgctggtgagatataccaagaaggtgccacaggtgtctacccccacactggtggaggtgagccggaatctgggcaaggtcggctccaagtgctgtaagcaccctgaggccaagagaatgccatgcgccgaggattacctgtccgtggtgctgaaccagctgtgcgtgctgcacgagaagacccccgtgagcgacagggtgaccaagtgctgtacagagtctctggtgaaccggagaccatgctttagcgccctggaggtggatgagacatatgtgcccaaggagttcaatgccgagaccttcacatttcacgccgacatctgtaccctgagcgagaaggagcgccagatcaagaagcagacagccctggtggagctggtgaagcacaagccaaaggccaccaaggagcagctgaaggccgtgatggacgatttcgccgcctttgtggagaagtgctgtaaggccgacgataaggagacatgcttcgcagaggagggcaagaagctggtggcagcaagccaggcagcaggtggtagcggcggcagtcctctgggactggcgggcggcagcggccggaagggaagtctttctggcagaagcgacaatcacggcggttccggaggttccgaggtgcagctggtggagtccggcggcggcctggtgcagcccggcggcagcctgaggctgtcctgcgccgcctctggcttcacctttaacacatacgcaatgaattgggtgcgccaggcaccaggcaagggactggagtgggtggcccggatcagaagcaagtacaacaattatgccacctactatgccgactccgtgaaggatcggtttaccatcagcagagacgattccaagaacacactgtatctgcagatgaatagcctgcgggccgaggatacagccgtgtactattgcgtgagacacggcaactttggcaattcttacgtgagctggttcgcctattggggccagggcaccatggtgacagtgtcctctgcctctaccaagggacctagcgtgttcccactggcacctagctccaagtctaccagcggaggcacagccgccctgggatgtctggtgaaggactactttccagagcccgtgacagtgtcctggaactctggcgccctgaccagcggagtgcacacattccctgccgtgctgcagtctagcggcctgtactccctgtcctctgtggtgaccgtgccaagctcctctctgggcacccagacatatatctgcaacgtgaatcacaagccctctaatacaaaggtggacaagagggtggagcctaagagctgccccccttgtggcggaggcggtagcgacatccagatgacacagtctccctcttccctgtctgcttccgtgggcgatagagtgacaatcacctgtcgcgccagcgagaacatctactcttatctggcttggtaccagcagaagcccggcaaggcccctaagctgctgatctataatgccaagacactggctgagggcgtgccttccaggttcagcggatctggatccggaaccgactttacactgaccatcagctctctgcagccagaggattttgccacatactattgccagcatcattacggaacaccaagaacattcggcgggggaacaaaagtggaaatcaagggcggaggcgggtctggaggtggagggagtggaggaggggggagcggtgggggaggtagccaggtccagctggtgcagtcaggagccgaggtgaagaagccaggggcatcagtcaaggtgtcatgtaaagcatcaggttatacttttacctcctactggatgaactgggtgaggcaggctccaggacagggcctggagtggatgggaaggatcgacccctacgatagcgagacacactatgctcagaagctgcagggcagagtgaccatgaccacagacacctccacaagcaccgcctatatggagctgaggagcctgcggtctgacgataccgccgtgtactattgcgctcgcggcggctacgacttcgatgtgggcacactgtattggttctttgacgtgtggggccagggcaccacagtgaccgtgtccagc

SEQ ID NO: 296 - DNA, 3411 bp, Artificial Sequence
  source: /note="Description of Artificial Sequence: Synthetic CD3cap105-ALB-MC3-hF3.5Fd-NKG2A sequence"
caggacggcaccgagaagatgggcggcatcacccagacaccatacaaggtgagcatctccggcaccacagtgatcctgaccggaggaggcagcggaggaggctccggaggcggctctgaggtggcccacaggttcaaggatctgggcgaggagaacttcaaggccctggtgctgatcgccttcgcccagtatctgcagcagtgcccctttgaggaccacgtgaagctggtgaacgaggtgaccgagttcgccaagacatgcgtggccgacgagtccgccgagaattgtgataagtctctgcacaccctgtttggcgataagctgtgcaccgtggccacactgagggagacatacggcgagatggccgactgctgtgccaagcaggagcccgagcgcaacgagtgcttcctgcagcacaaggacgataaccctaatctgccacggctggtgagacctgaggtggacgtgatgtgcaccgccttccacgataatgaggagacatttctgaagaagtacctgtatgagatcgcccggagacacccttacttttatgccccagagctgctgttctttgccaagcggtacaaggcagccttcaccgagtgctgtcaggcagcagataaggcagcatgcctgctgccaaagctggacgagctgagggatgagggcaaggcaagctccgccaagcagcgcctgaagtgtgcaagcctgcagaagttcggagagagggcctttaaggcatgggcagtggcaaggctgtcccagcggttcccaaaggccgagtttgccgaggtgtctaagctggtgaccgacctgacaaaggtgcacaccgagtgctgtcacggcgacctgctggagtgcgcagacgatagagccgatctggccaagtacatctgtgagaaccaggactctatctctagcaagctgaaggagtgctgtgagaagcccctgctggagaagtcccactgcatcgccgaggtggagaacgacgagatgccagcagatctgccaagcctggcagcagacttcgtggagtccaaggacgtgtgcaagaattacgccgaggccaaggacgtgttcctgggcatgtttctgtacgagtatgccaggcgccaccctgactactccgtggtgctgctgctgcggctggccaagacctatgagaccacactggagaagtgctgtgccgccgccgacccccacgagtgctatgcaaaggtgttcgacgagtttaagcccctggtggaggagcctcagaacctgatcaagcagaattgtgagctgtttgagcagctgggcgagtacaagttccagaacgccctgctggtgagatataccaagaaggtgccacaggtgtctacccccacactggtggaggtgagccggaatctgggcaaggtcggctccaagtgctgtaagcaccctgaggccaagagaatgccatgcgccgaggattacctgtccgtggtgctgaaccagctgtgcgtgctgcacgagaagacccccgtgagcgacagggtgaccaagtgctgtacagagtctctggtgaaccggagaccatgctttagcgccctggaggtggatgagacatatgtgcccaaggagttcaatgccgagaccttcacatttcacgccgacatctgtaccctgagcgagaaggagcgccagatcaagaagcagacagccctggtggagctggtgaagcacaagccaaaggccaccaaggagcagctgaaggccgtgatggacgatttcgccgcctttgtggagaagtgctgtaaggccgacgataaggagacatgcttcgcagaggagggcaagaagctggtggcagcaagccaggcagcaggtggtagcggcggcagtcctctgggactggcgggcggcagcggccggaagggaagtctttctggcagaagcgacaatcacggcggttccggaggttccgaggtgcagctggtggagtccggcggcggcctggtgcagcccggcggcagcctgaggctgtcctgcgccgcctctggcttcacctttaacacatacgcaatgaattgggtgcgccaggcaccaggcaagggactggagtgggtggcccggatcagaagcaagtacaacaattatgccacctactatgccgactccgtgaaggatcggtttaccatcagcagagacgattccaagaacacactgtatctgcagatgaatagcctgcgggccgaggatacagccgtgtactattgcgtgagacacggcaactttggcaattcttacgtgagctggttcgcctattggggccagggcaccatggtgacagtgtcctctgcctctaccaagggacctagcgtgttcccactggcacctagctccaagtctaccagcggaggcacagccgccctgggatgtctggtgaaggactactttccagagcccgtgacagtgtcctggaactctggcgccctgaccagcggagtgcacacattccctgccgtgctgcagtctagcggcctgtactccctgtcctctgtggtgaccgtgccaagctcctctctgggcacccagacatatatctgcaacgtgaatcacaagccctctaatacaaaggtggacaagagggtggagcctaagagctgccccccttgtggcggaggcggtagcgacatccagatgacacagtctccctcttccctgtctgcttccgtgggcgatagagtgacaatcacctgtcgcgccagcgagaacatctactcttatctggcttggtaccagcagaagcccggcaaggcccctaagctgctgatctataatgccaagacactggctgagggcgtgccttccaggttcagcggatctggatccggaaccgactttacactgaccatcagctctctgcagccagaggattttgccacatactattgccagcatcattacggaacaccaagaacattcggcgggggaacaaaagtggaaatcaagggcggaggcgggtctggaggtggagggagtggaggaggggggagcggtgggggaggtagccaggtccagctggtgcagtcaggagccgaggtgaagaagccaggggcatcagtcaaggtgtcatgtaaagcatcaggttatacttttacctcctactggatgaactgggtgaggcaggctccaggacagggcctggagtggatgggaaggatcgacccctacgatagcgagacacactatgctcagaagctgcagggcagagtgaccatgaccacagacacctccacaagcaccgcctatatggagctgaggagcctgcggtctgacgataccgccgtgtactattgcgctcgcggcggctacgacttcgatgtgggcacactgtattggttctttgacgtgtggggccagggcaccacagtgaccgtgtccagc

SEQ ID NO: 297 - DNA, 3393 bp, Artificial Sequence
  source: /note="Description of Artificial Sequence: Synthetic CD3cap137-ALB-NC-hF3.5Fd-NKG2A sequence"
caggacggcaacgaggagatgggcggcatcacccagacaccatacaaggtgagcatctccggcaccacagtgatcctgaccggaggaggcagcggaggaggctccggaggcggctctgaggtggcccacaggttcaaggatctgggcgaggagaacttcaaggccctggtgctgatcgccttcgcccagtatctgcagcagtgcccctttgaggaccacgtgaagctggtgaacgaggtgaccgagttcgccaagacatgcgtggccgacgagtccgccgagaattgtgataagtctctgcacaccctgtttggcgataagctgtgcaccgtggccacactgagggagacatacggcgagatggccgactgctgtgccaagcaggagcccgagcgcaacgagtgcttcctgcagcacaaggacgataaccctaatctgccacggctggtgagacctgaggtggacgtgatgtgcaccgccttccacgataatgaggagacatttctgaagaagtacctgtatgagatcgcccggagacacccttacttttatgccccagagctgctgttctttgccaagcggtacaaggcagccttcaccgagtgctgtcaggcagcagataaggcagcatgcctgctgccaaagctggacgagctgagggatgagggcaaggcaagctccgccaagcagcgcctgaagtgtgcaagcctgcagaagttcggagagagggcctttaaggcatgggcagtggcaaggctgtcccagcggttcccaaaggccgagtttgccgaggtgtctaagctggtgaccgacctgacaaaggtgcacaccgagtgctgtcacggcgacctgctggagtgcgcagacgatagagccgatctggccaagtacatctgtgagaaccaggactctatctctagcaagctgaaggagtgctgtgagaagcccctgctggagaagtcccactgcatcgccgaggtggagaacgacgagatgccagcagatctgccaagcctggcagcagacttcgtggagtccaaggacgtgtgcaagaattacgccgaggccaaggacgtgttcctgggcatgtttctgtacgagtatgccaggcgccaccctgactactccgtggtgctgctgctgcggctggccaagacctatgagaccacactggagaagtgctgtgccgccgccgacccccacgagtgctatgcaaaggtgttcgacgagtttaagcccctggtggaggagcctcagaacctgatcaagcagaattgtgagctgtttgagcagctgggcgagtacaagttccagaacgccctgctggtgagatataccaagaaggtgccacaggtgtctacccccacactggtggaggtgagccggaatctgggcaaggtcggctccaagtgctgtaagcaccctgaggccaagagaatgccatgcgccgaggattacctgtccgtggtgctgaaccagctgtgcgtgctgcacgagaagacccccgtgagcgacagggtgaccaagtgctgtacagagtctctggtgaaccggagaccatgctttagcgccctggaggtggatgagacatatgtgcccaaggagttcaatgccgagaccttcacatttcacgccgacatctgtaccctgagcgagaaggagcgccagatcaagaagcagacagccctggtggagctggtgaagcacaagccaaaggccaccaaggagcagctgaaggccgtgatggacgatttcgccgcctttgtggagaagtgctgtaaggccgacgataaggagacatgcttcgcagaggagggcaagaagctggtggcagcaagccaggcagcaggaggctccggcggctctggtggcagtggagggagcggtggatctggcgggtcaggcgggtccggcggcagcggcggctccgaggtgcagctggtggagtccggcggcggcctggtgcagcccggcggcagcctgaggctgtcctgcgccgcctctggcttcacctttaacacatacgcaatgaattgggtgcgccaggcaccaggcaagggactggagtgggtggcccggatcagaagcaagtacaacaattatgccacctactatgccgactccgtgaaggatcggtttaccatcagcagagacgattccaagaacacactgtatctgcagatgaatagcctgcgggccgaggatacagccgtgtactattgcgtgagacacggcaactttggcaattcttacgtgagctggttcgcctattggggccagggcaccatggtgacagtgtcctctgcctctaccaagggacctagcgtgttcccactggcacctagctccaagtctaccagcggaggcacagccgccctgggatgtctggtgaaggactactttccagagcccgtgacagtgtcctggaactctggcgccctgaccagcggagtgcacacattccctgccgtgctgcagtctagcggcctgtactccctgtcctctgtggtgaccgtgccaagctcctctctgggcacccagacatatatctgcaacgtgaatcacaagccctctaatacaaaggtggacaagagggtggagcctaagagctgccccccttgtggcggaggcggtagcgacatccagatgacacagtctccctcttccctgtctgcttccgtgggcgatagagtgacaatcacctgtcgcgccagcgagaacatctactcttatctggcttggtaccagcagaagcccggcaaggcccctaagctgctgatctataatgccaagacactggctgagggcgtgccttccaggttcagcggatctggatccggaaccgactttacactgaccatcagctctctgcagccagaggattttgccacatactattgccagcatcattacggaacaccaagaacattcggcgggggaacaaaagtggaaatcaagggcggaggcgggtctggaggtggagggagtggaggaggggggagcggtgggggaggtagccaggtccagctggtgcagtcaggagccgaggtgaagaagccaggggcatcagtcaaggtgtcatgtaaagcatcaggttatacttttacctcctactggatgaactgggtgaggcaggctccaggacagggcctggagtggatgggaaggatcgacccctacgatagcgagacacactatgctcagaagctgcagggcagagtgaccatgaccacagacacctccacaagcaccgcctatatggagctgaggagcctgcggtctgacgataccgccgtgtactattgcgctcgcggcggctacgacttcgatgtgggcacactgtattggttctttgacgtgtggggccagggcaccacagtgaccgtgtccagc

SEQ ID NO: 298 - DNA, 3393 bp, Artificial Sequence
  source: /note="Description of Artificial Sequence: Synthetic CD3cap116-ALB-NC-hF3.5Fd-NKG2A sequence"
caggacggccaggaggagatgggcggcatcacccagacaccatacaaggtgagcatctccggcaccacagtgatcctgaccggaggaggcagcggaggaggctccggaggcggctctgaggtggcccacaggttcaaggatctgggcgaggagaacttcaaggccctggtgctgatcgccttcgcccagtatctgcagcagtgcccctttgaggaccacgtgaagctggtgaacgaggtgaccgagttcgccaagacatgcgtggccgacgagtccgccgagaattgtgataagtctctgcacaccctgtttggcgataagctgtgcaccgtggccacactgagggagacatacggcgagatggccgactgctgtgccaagcaggagcccgagcgcaacgagtgcttcctgcagcacaaggacgataaccctaatctgccacggctggtgagacctgaggtggacgtgatgtgcaccgccttccacgataatgaggagacatttctgaagaagtacctgtatgagatcgcccggagacacccttacttttatgccccagagctgctgttctttgccaagcggtacaaggcagccttcaccgagtgctgtcaggcagcagataaggcagcatgcctgctgccaaagctggacgagctgagggatgagggcaaggcaagctccgccaagcagcgcctgaagtgtgcaagcctgcagaagttcggagagagggcctttaaggcatgggcagtggcaaggctgtcccagcggttcccaaaggccgagtttgccgaggtgtctaagctggtgaccgacctgacaaaggtgcacaccgagtgctgtcacggcgacctgctggagtgcgcagacgatagagccgatctggccaagtacatctgtgagaaccaggactctatctctagcaagctgaaggagtgctgtgagaagcccctgctggagaagtcccactgcatcgccgaggtggagaacgacgagatgccagcagatctgccaagcctggcagcagacttcgtggagtccaaggacgtgtgcaagaattacgccgaggccaaggacgtgttcctgggcatgtttctgtacgagtatgccaggcgccaccctgactactccgtggtgctgctgctgcggctggccaagacctatgagaccacactggagaagtgctgtgccgccgccgacccccacgagtgctatgcaaaggtgttcgacgagtttaagcccctggtggaggagcctcagaacctgatcaagcagaattgtgagctgtttgagcagctgggcgagtacaagttccagaacgccctgctggtgagatataccaagaaggtgccacaggtgtctacccccacactggtggaggtgagccggaatctgggcaaggtcggctccaagtgctgtaagcaccctgaggccaagagaatgccatgcgccgaggattacctgtccgtggtgctgaaccagctgtgcgtgctgcacgagaagacccccgtgagcgacagggtgaccaagtgctgtacagagtctctggtgaaccggagaccatgctttagcgccctggaggtggatgagacatatgtgcccaaggagttcaatgccgagaccttcacatttcacgccgacatctgtaccctgagcgagaaggagcgccagatcaagaagcagacagccctggtggagctggtgaagcacaagccaaaggccaccaaggagcagctgaaggccgtgatggacgatttcgccgcctttgtggagaagtgctgtaaggccgacgataaggagacatgcttcgcagaggagggcaagaagctggtggcagcaagccaggcagcaggaggctccggcggctctggtggcagtggagggagcggtggatctggcgggtcaggcgggtccggcggcagcggcggctccgaggtgcagctggtggagtccggcggcggcctggtgcagcccggcggcagcctgaggctgtcctgcgccgcctctggcttcacctttaacacatacgcaatgaattgggtgcgccaggcaccaggcaagggactggagtgggtggcccggatcagaagcaagtacaacaattatgccacctactatgccgactccgtgaaggatcggtttaccatcagcagagacgattccaagaacacactgtatctgcagatgaatagcctgcgggccgaggatacagccgtgtactattgcgtgagacacggcaactttggcaattcttacgtgagctggttcgcctattggggccagggcaccatggtgacagtgtcctctgcctctaccaagggacctagcgtgttcccactggcacctagctccaagtctaccagcggaggcacagccgccctgggatgtctggtgaaggactactttccagagcccgtgacagtgtcctggaactctggcgccctgaccagcggagtgcacacattccctgccgtgctgcagtctagcggcctgtactccctgtcctctgtggtgaccgtgccaagctcctctctgggcacccagacatatatctgcaacgtgaatcacaagccctctaatacaaaggtggacaagagggtggagcctaagagctgccccccttgtggcggaggcggtagcgacatccagatgacacagtctccctcttccctgtctgcttccgtgggcgatagagtgacaatcacctgtcgcgccagcgagaacatctactcttatctggcttggtaccagcagaagcccggcaaggcccctaagctgctgatctataatgccaagacactggctgagggcgtgccttccaggttcagcggatctggatccggaaccgactttacactgaccatcagctctctgcagccagaggattttgccacatactattgccagcatcattacggaacaccaagaacattcggcgggggaacaaaagtggaaatcaagggcggaggcgggtctggaggtggagggagtggaggaggggggagcggtgggggaggtagccaggtccagctggtgcagtcaggagccgaggtgaagaagccaggggcatcagtcaaggtgtcatgtaaagcatcaggttatacttttacctcctactggatgaactgggtgaggcaggctccaggacagggcctggagtggatgggaaggatcgacccctacgatagcgagacacactatgctcagaagctgcagggcagagtgaccatgaccacagacacctccacaagcaccgcctatatggagctgaggagcctgcggtctgacgataccgccgtgtactattgcgctcgcggcggctacgacttcgatgtgggcacactgtattggttctttgacgtgtggggccagggcaccacagtgaccgtgtccagc

SEQ ID NO: 299 - DNA, 3399 bp, Artificial Sequence
  source: /note="Description of Artificial Sequence: Synthetic CD3cap118-ALB-NC-hF3.5Fd-NKG2A sequence"
accggcctggacggccaggaggagctgggcggcatcacccagacaccatacaaggtgagcatctccggcaccacagtgatcctgaccggaggaggcagcggaggaggctccggaggcggctctgaggtggcccacaggttcaaggatctgggcgaggagaacttcaaggccctggtgctgatcgccttcgcccagtatctgcagcagtgcccctttgaggaccacgtgaagctggtgaacgaggtgaccgagttcgccaagacatgcgtggccgacgagtccgccgagaattgtgataagtctctgcacaccctgtttggcgataagctgtgcaccgtggccacactgagggagacatacggcgagatggccgactgctgtgccaagcaggagcccgagcgcaacgagtgcttcctgcagcacaaggacgataaccctaatctgccacggctggtgagacctgaggtggacgtgatgtgcaccgccttccacgataatgaggagacatttctgaagaagtacctgtatgagatcgcccggagacacccttacttttatgccccagagctgctgttctttgccaagcggtacaaggcagccttcaccgagtgctgtcaggcagcagataaggcagcatgcctgctgccaaagctggacgagctgagggatgagggcaaggcaagctccgccaagcagcgcctgaagtgtgcaagcctgcagaagttcggagagagggcctttaaggcatgggcagtggcaaggctgtcccagcggttcccaaaggccgagtttgccgaggtgtctaagctggtgaccgacctgacaaaggtgcacaccgagtgctgtcacggcgacctgctggagtgcgcagacgatagagccgatctggccaagtacatctgtgagaaccaggactctatctctagcaagctgaaggagtgctgtgagaagcccctgctggagaagtcccactgcatcgccgaggtggagaacgacgagatgccagcagatctgccaagcctggcagcagacttcgtggagtccaaggacgtgtgcaagaattacgccgaggccaaggacgtgttcctgggcatgtttctgtacgagtatgccaggcgccaccctgactactccgtggtgctgctgctgcggctggccaagacctatgagaccacactggagaagtgctgtgccgccgccgacccccacgagtgctatgcaaaggtgttcgacgagtttaagcccctggtggaggagcctcagaacctgatcaagcagaattgtgagctgtttgagcagctgggcgagtacaagttccagaacgccctgctggtgagatataccaagaaggtgccacaggtgtctacccccacactggtggaggtgagccggaatctgggcaaggtcggctccaagtgctgtaagcaccctgaggccaagagaatgccatgcgccgaggattacctgtccgtggtgctgaaccagctgtgcgtgctgcacgagaagacccccgtgagcgacagggtgaccaagtgctgtacagagtctctggtgaaccggagaccatgctttagcgccctggaggtggatgagacatatgtgcccaaggagttcaatgccgagaccttcacatttcacgccgacatctgtaccctgagcgagaaggagcgccagatcaagaagcagacagccctggtggagctggtgaagcacaagccaaaggccaccaaggagcagctgaaggccgtgatggacgatttcgccgcctttgtggagaagtgctgtaaggccgacgataaggagacatgcttcgcagaggagggcaagaagctggtggcagcaagccaggcagcaggaggctccggcggctctggtggcagtggagggagcggtggatctggcgggtcaggcgggtccggcggcagcggcggctccgaggtgcagctggtggagtccggcggcggcctggtgcagcccggcggcagcctgaggctgtcctgcgccgcctctggcttcacctttaacacatacgcaatgaattgggtgcgccaggcaccaggcaagggactggagtgggtggcccggatcagaagcaagtacaacaattatgccacctactatgccgactccgtgaaggatcggtttaccatcagcagagacgattccaagaacacactgtatctgcagatgaatagcctgcgggccgaggatacagccgtgtactattgcgtgagacacggcaactttggcaattcttacgtgagctggttcgcctattggggccagggcaccatggtgacagtgtcctctgcctctaccaagggacctagcgtgttcccactggcacctagctccaagtctaccagcggaggcacagccgccctgggatgtctggtgaaggactactttccagagcccgtgacagtgtcctggaactctggcgccctgaccagcggagtgcacacattccctgccgtgctgcagtctagcggcctgtactccctgtcctctgtggtgaccgtgccaagctcctctctgggcacccagacatatatctgcaacgtgaatcacaagccctctaatacaaaggtggacaagagggtggagcctaagagctgccccccttgtggcggaggcggtagcgacatccagatgacacagtctccctcttccctgtctgcttccgtgggcgatagagtgacaatcacctgtcgcgccagcgagaacatctactcttatctggcttggtaccagcagaagcccggcaaggcccctaagctgctgatctataatgccaagacactggctgagggcgtgccttccaggttcagcggatctggatccggaaccgactttacactgaccatcagctctctgcagccagaggattttgccacatactattgccagcatcattacggaacaccaagaacattcggcgggggaacaaaagtggaaatcaagggcggaggcgggtctggaggtggagggagtggaggaggggggagcggtgggggaggtagccaggtccagctggtgcagtcaggagccgaggtgaagaagccaggggcatcagtcaaggtgtcatgtaaagcatcaggttatacttttacctcctactggatgaactgggtgaggcaggctccaggacagggcctggagtggatgggaaggatcgacccctacgatagcgagacacactatgctcagaagctgcagggcagagtgaccatgaccacagacacctccacaagcaccgcctatatggagctgaggagcctgcggtctgacgataccgccgtgtactattgcgctcgcggcggctacgacttcgatgtgggcacactgtattggttctttgacgtgtggggccagggcaccacagtgaccgtgtccagc

SEQ ID NO: 300 - DNA, 3393 bp, Artificial Sequence
  source: /note="Description of Artificial Sequence: Synthetic CD3cap105-ALB-NC-hF3.5Fd-NKG2A sequence"
caggacggcaccgagaagatgggcggcatcacccagacaccatacaaggtgagcatctccggcaccacagtgatcctgaccggaggaggcagcggaggaggctccggaggcggctctgaggtggcccacaggttcaaggatctgggcgaggagaacttcaaggccctggtgctgatcgccttcgcccagtatctgcagcagtgcccctttgaggaccacgtgaagctggtgaacgaggtgaccgagttcgccaagacatgcgtggccgacgagtccgccgagaattgtgataagtctctgcacaccctgtttggcgataagctgtgcaccgtggccacactgagggagacatacggcgagatggccgactgctgtgccaagcaggagcccgagcgcaacgagtgcttcctgcagcacaaggacgataaccctaatctgccacggctggtgagacctgaggtggacgtgatgtgcaccgccttccacgataatgaggagacatttctgaagaagtacctgtatgagatcgcccggagacacccttacttttatgccccagagctgctgttctttgccaagcggtacaaggcagccttcaccgagtgctgtcaggcagcagataaggcagcatgcctgctgccaaagctggacgagctgagggatgagggcaaggcaagctccgccaagcagcgcctgaagtgtgcaagcctgcagaagttcggagagagggcctttaaggcatgggcagtggcaaggctgtcccagcggttcccaaaggccgagtttgccgaggtgtctaagctggtgaccgacctgacaaaggtgcacaccgagtgctgtcacggcgacctgctggagtgcgcagacgatagagccgatctggccaagtacatctgtgagaaccaggactctatctctagcaagctgaaggagtgctgtgagaagcccctgctggagaagtcccactgcatcgccgaggtggagaacgacgagatgccagcagatctgccaagcctggcagcagacttcgtggagtccaaggacgtgtgcaagaattacgccgaggccaaggacgtgttcctgggcatgtttctgtacgagtatgccaggcgccaccctgactactccgtggtgctgctgctgcggctggccaagacctatgagaccacactggagaagtgctgtgccgccgccgacccccacgagtgctatgcaaaggtgttcgacgagtttaagcccctggtggaggagcctcagaacctgatcaagcagaattgtgagctgtttgagcagctgggcgagtacaagttccagaacgccctgctggtgagatataccaagaaggtgccacaggtgtctacccccacactggtggaggtgagccggaatctgggcaaggtcggctccaagtgctgtaagcaccctgaggccaagagaatgccatgcgccgaggattacctgtccgtggtgctgaaccagctgtgcgtgctgcacgagaagacccccgtgagcgacagggtgaccaagtgctgtacagagtctctggtgaaccggagaccatgctttagcgccctggaggtggatgagacatatgtgcccaaggagttcaatgccgagaccttcacatttcacgccgacatctgtaccctgagcgagaaggagcgccagatcaagaagcagacagccctggtggagctggtgaagcacaagccaaaggccaccaaggagcagctgaaggccgtgatggacgatttcgccgcctttgtggagaagtgctgtaaggccgacgataaggagacatgcttcgcagaggagggcaagaagctggtggcagcaagccaggcagcaggaggctccggcggctctggtggcagtggagggagcggtggatctggcgggtcaggcgggtccggcggcagcggcggctccgaggtgcagctggtggagtccggcggcggcctggtgcagcccggcggcagcctgaggctgtcctgcgccgcctctggcttcacctttaacacatacgcaatgaattgggtgcgccaggcaccaggcaagggactggagtgggtggcccggatcagaagcaagtacaacaattatgccacctactatgccgactccgtgaaggatcggtttaccatcagcagagacgattccaagaacacactgtatctgcagatgaatagcctgcgggccgaggatacagccgtgtactattgcgtgagacacggcaactttggcaattcttacgtgagctggttcgcctattggggccagggcaccatggtgacagtgtcctctgcctctaccaagggacctagcgtgttcccactggcacctagctccaagtctaccagcggaggcacagccgccctgggatgtctggtgaaggactactttccagagcccgtgacagtgtcctggaactctggcgccctgaccagcggagtgcacacattccctgccgtgctgcagtctagcggcctgtactccctgtcctctgtggtgaccgtgccaagctcctctctgggcacccagacatatatctgcaacgtgaatcacaagccctctaatacaaaggtggacaagagggtggagcctaagagctgccccccttgtggcggaggcggtagcgacatccagatgacacagtctccctcttccctgtctgcttccgtgggcgatagagtgacaatcacctgtcgcgccagcgagaacatctactcttatctggcttggtaccagcagaagcccggcaaggcccctaagctgctgatctataatgccaagacactggctgagggcgtgccttccaggttcagcggatctggatccggaaccgactttacactgaccatcagctctctgcagccagaggattttgccacatactattgccagcatcattacggaacaccaagaacattcggcgggggaacaaaagtggaaatcaagggcggaggcgggtctggaggtggagggagtggaggaggggggagcggtgggggaggtagccaggtccagctggtgcagtcaggagccgaggtgaagaagccaggggcatcagtcaaggtgtcatgtaaagcatcaggttatacttttacctcctactggatgaactgggtgaggcaggctccaggacagggcctggagtggatgggaaggatcgacccctacgatagcgagacacactatgctcagaagctgcagggcagagtgaccatgaccacagacacctccacaagcaccgcctatatggagctgaggagcctgcggtctgacgataccgccgtgtactattgcgctcgcggcggctacgacttcgatgtgggcacactgtattggttctttgacgtgtggggccagggcaccacagtgaccgtgtccagc

SEQ ID NO: 301 - DNA, 1479 bp, Artificial Sequence
  source: /note="Description of Artificial Sequence: Synthetic h1F3.5FdMut3- KYK2.0Mut_ScFv(L-H) sequence"
ggcggcagcggcggctccgaggtgcagctggtggagtccggcggcggcctggtgcagcccggcggcagcctgaggctgtcctgcgccgcctctggcttcacctttaacacatacgcaatgaattgggtgcgccaggcaccaggcaagggactggagtgggtggcccggatcggcagcggcggaaacggctatgccacctactatgccgactccgtgaaggatcggtttaccatcagcagagacgattccaagaacacactgtatctgcagatgaatagcctgcgggccgaggatacagccgtgtactattgcgtgagacacggcaactttggcgccagcgctcggagctggttcgcctattggggccagggcaccatggtgacagtgtcctctgcctctaccaagggacctagcgtgttcccactggcacctagctccaagtctaccagcggaggcacagccgccctgggatgtctggtgaaggactactttccagagcccgtgacagtgtcctggaactctggcgccctgaccagcggagtgcacacattccctgccgtgctgcagtctagcggcctgtactccctgtcctctgtggtgaccgtgccaagctcctctctgggcacccagacatatatctgcaacgtgaatcacaagccctctaatacaaaggtggacaagagggtggagcctaagagctgccccccttgtggcggaggcggtagccagtctgctctgacccagccagcctccgtctccggttcaccaggacagtcaatcacaatctcatgtagtggaagttcatcaaatatcggcaacaatgccgtgaactggtaccagcagctgcccggcaaggctcctaagctgctgatctacgccgacgatctgctgccttctggcgtgtccgacagattctctggctccaagagcggcacctctgcctttctggctatcagcggcctgcagtctgaggacgaggccgattactattgcgccgcttgggacgattccctgaatggaccagtgttcggaggaggaaccaagctgacagtgctgggcggaggcgggtctggaggtggagggagtggaggaggggggagcggtgggggaggtagccaggtgcagctggtggagagcggaggaggcctggtgaagccaggaggctccctgaggctgagctgtgccgcttctggcttcaccttttccagctacggaatgcactgggtgaggcaggctccaggcaagggcctggagtgggtggctttcatccggtatgacggctccaacaagtactatgccgatagcgtgaagggcaggtttaccatctcccgggataacagcaagaatacactgtatctgcagatgaattctctgagagccgaggacacagccgtgtactattgcgctaaggatgccggcgagggggacggaacttactttgactactgggggcaggggactactgtgactgtctcatca

SEQ ID NO: 302 - DNA, 1482 bp, Artificial Sequence
  source: /note="Description of Artificial Sequence: Synthetic h1F3.5FdMut3- NKG2AMut_ScFv(L-H) sequence"
ggcggcagcggcggctccgaggtgcagctggtggagtccggcggcggcctggtgcagcccggcggcagcctgaggctgtcctgcgccgcctctggcttcacctttaacacatacgcaatgaattgggtgcgccaggcaccaggcaagggactggagtgggtggcccggatcggcagcggcggaaacggctatgccacctactatgccgactccgtgaaggatcggtttaccatcagcagagacgattccaagaacacactgtatctgcagatgaatagcctgcgggccgaggatacagccgtgtactattgcgtgagacacggcaactttggcgccagcgctcggagctggttcgcctattggggccagggcaccatggtgacagtgtcctctgcctctaccaagggacctagcgtgttcccactggcacctagctccaagtctaccagcggaggcacagccgccctgggatgtctggtgaaggactactttccagagcccgtgacagtgtcctggaactctggcgccctgaccagcggagtgcacacattccctgccgtgctgcagtctagcggcctgtactccctgtcctctgtggtgaccgtgccaagctcctctctgggcacccagacatatatctgcaacgtgaatcacaagccctctaatacaaaggtggacaagagggtggagcctaagagctgccccccttgtggcggaggcggtagcgacatccagatgacacagtctccctcttccctgtctgcttccgtgggcgatagagtgacaatcacctgtcgcgccagcgagaacatctactctgccctggcttggtaccagcagaagcccggcaaggcccctaagctgctgatctataatgccaagacactggctgagggcgtgccttccaggttcagcggatctggatccggaaccgactttacactgaccatcagctctctgcagccagaggattttgccacatactattgccagcatcatgccggaacaccaagaacattcggcgggggaacaaaagtggaaatcaagggcggaggcgggtctggaggtggagggagtggaggaggggggagcggtgggggaggtagccaggtccagctggtgcagtcaggagccgaggtgaagaagccaggggcatcagtcaaggtgtcatgtaaagcatcaggttatacttttacctcctactggatgaactgggtgaggcaggctccaggacagggcctggagtggatgggaaggatcgacccctacgatagcgagacacactatgctcagaagctgcagggcagagtgaccatgaccacagacacctccacaagcaccgcctatatggagctgaggagcctgcggtctgacgataccgccgtgtactattgcgctcgcggcggctacgacttcgatgtggacacactgtattggttctttgacgtgtggggccagggcaccacagtgaccgtgtccagc

SEQ ID NO: 303 - DNA, 3390 bp, Artificial Sequence
  source: /note="Description of Artificial Sequence: Synthetic CD3cap137-ALB-MC2-hF3.5Fd-NKG2AMut sequence"
caggacggcaacgaggagatgggcggcatcacccagacaccatacaaggtgagcatctccggcaccacagtgatcctgaccggaggaggcagcggaggaggctccggaggcggctctgaggtggcccacaggttcaaggatctgggcgaggagaacttcaaggccctggtgctgatcgccttcgcccagtatctgcagcagtgcccctttgaggaccacgtgaagctggtgaacgaggtgaccgagttcgccaagacatgcgtggccgacgagtccgccgagaattgtgataagtctctgcacaccctgtttggcgataagctgtgcaccgtggccacactgagggagacatacggcgagatggccgactgctgtgccaagcaggagcccgagcgcaacgagtgcttcctgcagcacaaggacgataaccctaatctgccacggctggtgagacctgaggtggacgtgatgtgcaccgccttccacgataatgaggagacatttctgaagaagtacctgtatgagatcgcccggagacacccttacttttatgccccagagctgctgttctttgccaagcggtacaaggcagccttcaccgagtgctgtcaggcagcagataaggcagcatgcctgctgccaaagctggacgagctgagggatgagggcaaggcaagctccgccaagcagcgcctgaagtgtgcaagcctgcagaagttcggagagagggcctttaaggcatgggcagtggcaaggctgtcccagcggttcccaaaggccgagtttgccgaggtgtctaagctggtgaccgacctgacaaaggtgcacaccgagtgctgtcacggcgacctgctggagtgcgcagacgatagagccgatctggccaagtacatctgtgagaaccaggactctatctctagcaagctgaaggagtgctgtgagaagcccctgctggagaagtcccactgcatcgccgaggtggagaacgacgagatgccagcagatctgccaagcctggcagcagacttcgtggagtccaaggacgtgtgcaagaattacgccgaggccaaggacgtgttcctgggcatgtttctgtacgagtatgccaggcgccaccctgactactccgtggtgctgctgctgcggctggccaagacctatgagaccacactggagaagtgctgtgccgccgccgacccccacgagtgctatgcaaaggtgttcgacgagtttaagcccctggtggaggagcctcagaacctgatcaagcagaattgtgagctgtttgagcagctgggcgagtacaagttccagaacgccctgctggtgagatataccaagaaggtgccacaggtgtctacccccacactggtggaggtgagccggaatctgggcaaggtcggctccaagtgctgtaagcaccctgaggccaagagaatgccatgcgccgaggattacctgtccgtggtgctgaaccagctgtgcgtgctgcacgagaagacccccgtgagcgacagggtgaccaagtgctgtacagagtctctggtgaaccggagaccatgctttagcgccctggaggtggatgagacatatgtgcccaaggagttcaatgccgagaccttcacatttcacgccgacatctgtaccctgagcgagaaggagcgccagatcaagaagcagacagccctggtggagctggtgaagcacaagccaaaggccaccaaggagcagctgaaggccgtgatggacgatttcgccgcctttgtggagaagtgctgtaaggccgacgataaggagacatgcttcgcagaggagggcaagaagctggtggcagcaagccaggcagcaggaggctccggcggctctccactgggcctggccggcctgagcggccggagcgacaaccacggcggcagcggcggctccgaggtgcagctggtggagtccggcggcggcctggtgcagcccggcggcagcctgaggctgtcctgcgccgcctctggcttcacctttaacacatacgcaatgaattgggtgcgccaggcaccaggcaagggactggagtgggtggcccggatcagaagcaagtacaacaattatgccacctactatgccgactccgtgaaggatcggtttaccatcagcagagacgattccaagaacacactgtatctgcagatgaatagcctgcgggccgaggatacagccgtgtactattgcgtgagacacggcaactttggcaattcttacgtgagctggttcgcctattggggccagggcaccatggtgacagtgtcctctgcctctaccaagggacctagcgtgttcccactggcacctagctccaagtctaccagcggaggcacagccgccctgggatgtctggtgaaggactactttccagagcccgtgacagtgtcctggaactctggcgccctgaccagcggagtgcacacattccctgccgtgctgcagtctagcggcctgtactccctgtcctctgtggtgaccgtgccaagctcctctctgggcacccagacatatatctgcaacgtgaatcacaagccctctaatacaaaggtggacaagagggtggagcctaagagctgccccccttgtggcggaggcggtagcgacatccagatgacacagtctccctcttccctgtctgcttccgtgggcgatagagtgacaatcacctgtcgcgccagcgagaacatctactctgccctggcttggtaccagcagaagcccggcaaggcccctaagctgctgatctataatgccaagacactggctgagggcgtgccttccaggttcagcggatctggatccggaaccgactttacactgaccatcagctctctgcagccagaggattttgccacatactattgccagcatcatgccggaacaccaagaacattcggcgggggaacaaaagtggaaatcaagggcggaggcgggtctggaggtggagggagtggaggaggggggagcggtgggggaggtagccaggtccagctggtgcagtcaggagccgaggtgaagaagccaggggcatcagtcaaggtgtcatgtaaagcatcaggttatacttttacctcctactggatgaactgggtgaggcaggctccaggacagggcctggagtggatgggaaggatcgacccctacgatagcgagacacactatgctcagaagctgcagggcagagtgaccatgaccacagacacctccacaagcaccgcctatatggagctgaggagcctgcggtctgacgataccgccgtgtactattgcgctcgcggcggctacgacttcgatgtggacacactgtattggttctttgacgtgtggggccagggcaccacagtgaccgtgtccagc

SEQ ID NO: 304 - DNA, 3411 bp, Artificial Sequence
  source: /note="Description of Artificial Sequence: Synthetic CD3cap137-ALB-MC3-hF3.5Fd-NKG2AMut sequence"
caggacggcaacgaggagatgggcggcatcacccagacaccatacaaggtgagcatctccggcaccacagtgatcctgaccggaggaggcagcggaggaggctccggaggcggctctgaggtggcccacaggttcaaggatctgggcgaggagaacttcaaggccctggtgctgatcgccttcgcccagtatctgcagcagtgcccctttgaggaccacgtgaagctggtgaacgaggtgaccgagttcgccaagacatgcgtggccgacgagtccgccgagaattgtgataagtctctgcacaccctgtttggcgataagctgtgcaccgtggccacactgagggagacatacggcgagatggccgactgctgtgccaagcaggagcccgagcgcaacgagtgcttcctgcagcacaaggacgataaccctaatctgccacggctggtgagacctgaggtggacgtgatgtgcaccgccttccacgataatgaggagacatttctgaagaagtacctgtatgagatcgcccggagacacccttacttttatgccccagagctgctgttctttgccaagcggtacaaggcagccttcaccgagtgctgtcaggcagcagataaggcagcatgcctgctgccaaagctggacgagctgagggatgagggcaaggcaagctccgccaagcagcgcctgaagtgtgcaagcctgcagaagttcggagagagggcctttaaggcatgggcagtggcaaggctgtcccagcggttcccaaaggccgagtttgccgaggtgtctaagctggtgaccgacctgacaaaggtgcacaccgagtgctgtcacggcgacctgctggagtgcgcagacgatagagccgatctggccaagtacatctgtgagaaccaggactctatctctagcaagctgaaggagtgctgtgagaagcccctgctggagaagtcccactgcatcgccgaggtggagaacgacgagatgccagcagatctgccaagcctggcagcagacttcgtggagtccaaggacgtgtgcaagaattacgccgaggccaaggacgtgttcctgggcatgtttctgtacgagtatgccaggcgccaccctgactactccgtggtgctgctgctgcggctggccaagacctatgagaccacactggagaagtgctgtgccgccgccgacccccacgagtgctatgcaaaggtgttcgacgagtttaagcccctggtggaggagcctcagaacctgatcaagcagaattgtgagctgtttgagcagctgggcgagtacaagttccagaacgccctgctggtgagatataccaagaaggtgccacaggtgtctacccccacactggtggaggtgagccggaatctgggcaaggtcggctccaagtgctgtaagcaccctgaggccaagagaatgccatgcgccgaggattacctgtccgtggtgctgaaccagctgtgcgtgctgcacgagaagacccccgtgagcgacagggtgaccaagtgctgtacagagtctctggtgaaccggagaccatgctttagcgccctggaggtggatgagacatatgtgcccaaggagttcaatgccgagaccttcacatttcacgccgacatctgtaccctgagcgagaaggagcgccagatcaagaagcagacagccctggtggagctggtgaagcacaagccaaaggccaccaaggagcagctgaaggccgtgatggacgatttcgccgcctttgtggagaagtgctgtaaggccgacgataaggagacatgcttcgcagaggagggcaagaagctggtggcagcaagccaggcagcaggtggtagcggcggcagtcctctgggactggcgggcggcagcggccggaagggaagtctttctggcagaagcgacaatcacggcggcagcggcggctccgaggtgcagctggtggagtccggcggcggcctggtgcagcccggcggcagcctgaggctgtcctgcgccgcctctggcttcacctttaacacatacgcaatgaattgggtgcgccaggcaccaggcaagggactggagtgggtggcccggatcagaagcaagtacaacaattatgccacctactatgccgactccgtgaaggatcggtttaccatcagcagagacgattccaagaacacactgtatctgcagatgaatagcctgcgggccgaggatacagccgtgtactattgcgtgagacacggcaactttggcaattcttacgtgagctggttcgcctattggggccagggcaccatggtgacagtgtcctctgcctctaccaagggacctagcgtgttcccactggcacctagctccaagtctaccagcggaggcacagccgccctgggatgtctggtgaaggactactttccagagcccgtgacagtgtcctggaactctggcgccctgaccagcggagtgcacacattccctgccgtgctgcagtctagcggcctgtactccctgtcctctgtggtgaccgtgccaagctcctctctgggcacccagacatatatctgcaacgtgaatcacaagccctctaatacaaaggtggacaagagggtggagcctaagagctgccccccttgtggcggaggcggtagcgacatccagatgacacagtctccctcttccctgtctgcttccgtgggcgatagagtgacaatcacctgtcgcgccagcgagaacatctactctgccctggcttggtaccagcagaagcccggcaaggcccctaagctgctgatctataatgccaagacactggctgagggcgtgccttccaggttcagcggatctggatccggaaccgactttacactgaccatcagctctctgcagccagaggattttgccacatactattgccagcatcatgccggaacaccaagaacattcggcgggggaacaaaagtggaaatcaagggcggaggcgggtctggaggtggagggagtggaggaggggggagcggtgggggaggtagccaggtccagctggtgcagtcaggagccgaggtgaagaagccaggggcatcagtcaaggtgtcatgtaaagcatcaggttatacttttacctcctactggatgaactgggtgaggcaggctccaggacagggcctggagtggatgggaaggatcgacccctacgatagcgagacacactatgctcagaagctgcagggcagagtgaccatgaccacagacacctccacaagcaccgcctatatggagctgaggagcctgcggtctgacgataccgccgtgtactattgcgctcgcggcggctacgacttcgatgtggacacactgtattggttctttgacgtgtggggccagggcaccacagtgaccgtgtccagc

SEQ ID NO: 305 - DNA, 3393 bp, Artificial Sequence
  source: /note="Description of Artificial Sequence: Synthetic CD3cap137-ALB-NC-hF3.5Fd-NKG2AMut sequence"
caggacggcaacgaggagatgggcggcatcacccagacaccatacaaggtgagcatctccggcaccacagtgatcctgaccggaggaggcagcggaggaggctccggaggcggctctgaggtggcccacaggttcaaggatctgggcgaggagaacttcaaggccctggtgctgatcgccttcgcccagtatctgcagcagtgcccctttgaggaccacgtgaagctggtgaacgaggtgaccgagttcgccaagacatgcgtggccgacgagtccgccgagaattgtgataagtctctgcacaccctgtttggcgataagctgtgcaccgtggccacactgagggagacatacggcgagatggccgactgctgtgccaagcaggagcccgagcgcaacgagtgcttcctgcagcacaaggacgataaccctaatctgccacggctggtgagacctgaggtggacgtgatgtgcaccgccttccacgataatgaggagacatttctgaagaagtacctgtatgagatcgcccggagacacccttacttttatgccccagagctgctgttctttgccaagcggtacaaggcagccttcaccgagtgctgtcaggcagcagataaggcagcatgcctgctgccaaagctggacgagctgagggatgagggcaaggcaagctccgccaagcagcgcctgaagtgtgcaagcctgcagaagttcggagagagggcctttaaggcatgggcagtggcaaggctgtcccagcggttcccaaaggccgagtttgccgaggtgtctaagctggtgaccgacctgacaaaggtgcacaccgagtgctgtcacggcgacctgctggagtgcgcagacgatagagccgatctggccaagtacatctgtgagaaccaggactctatctctagcaagctgaaggagtgctgtgagaagcccctgctggagaagtcccactgcatcgccgaggtggagaacgacgagatgccagcagatctgccaagcctggcagcagacttcgtggagtccaaggacgtgtgcaagaattacgccgaggccaaggacgtgttcctgggcatgtttctgtacgagtatgccaggcgccaccctgactactccgtggtgctgctgctgcggctggccaagacctatgagaccacactggagaagtgctgtgccgccgccgacccccacgagtgctatgcaaaggtgttcgacgagtttaagcccctggtggaggagcctcagaacctgatcaagcagaattgtgagctgtttgagcagctgggcgagtacaagttccagaacgccctgctggtgagatataccaagaaggtgccacaggtgtctacccccacactggtggaggtgagccggaatctgggcaaggtcggctccaagtgctgtaagcaccctgaggccaagagaatgccatgcgccgaggattacctgtccgtggtgctgaaccagctgtgcgtgctgcacgagaagacccccgtgagcgacagggtgaccaagtgctgtacagagtctctggtgaaccggagaccatgctttagcgccctggaggtggatgagacatatgtgcccaaggagttcaatgccgagaccttcacatttcacgccgacatctgtaccctgagcgagaaggagcgccagatcaagaagcagacagccctggtggagctggtgaagcacaagccaaaggccaccaaggagcagctgaaggccgtgatggacgatttcgccgcctttgtggagaagtgctgtaaggccgacgataaggagacatgcttcgcagaggagggcaagaagctggtggcagcaagccaggcagcaggaggctccggcggctctggtggcagtggagggagcggtggatctggcgggtcaggcgggtccggcggcagcggcggctccgaggtgcagctggtggagtccggcggcggcctggtgcagcccggcggcagcctgaggctgtcctgcgccgcctctggcttcacctttaacacatacgcaatgaattgggtgcgccaggcaccaggcaagggactggagtgggtggcccggatcagaagcaagtacaacaattatgccacctactatgccgactccgtgaaggatcggtttaccatcagcagagacgattccaagaacacactgtatctgcagatgaatagcctgcgggccgaggatacagccgtgtactattgcgtgagacacggcaactttggcaattcttacgtgagctggttcgcctattggggccagggcaccatggtgacagtgtcctctgcctctaccaagggacctagcgtgttcccactggcacctagctccaagtctaccagcggaggcacagccgccctgggatgtctggtgaaggactactttccagagcccgtgacagtgtcctggaactctggcgccctgaccagcggagtgcacacattccctgccgtgctgcagtctagcggcctgtactccctgtcctctgtggtgaccgtgccaagctcctctctgggcacccagacatatatctgcaacgtgaatcacaagccctctaatacaaaggtggacaagagggtggagcctaagagctgccccccttgtggcggaggcggtagcgacatccagatgacacagtctccctcttccctgtctgcttccgtgggcgatagagtgacaatcacctgtcgcgccagcgagaacatctactctgccctggcttggtaccagcagaagcccggcaaggcccctaagctgctgatctataatgccaagacactggctgagggcgtgccttccaggttcagcggatctggatccggaaccgactttacactgaccatcagctctctgcagccagaggattttgccacatactattgccagcatcatgccggaacaccaagaacattcggcgggggaacaaaagtggaaatcaagggcggaggcgggtctggaggtggagggagtggaggaggggggagcggtgggggaggtagccaggtccagctggtgcagtcaggagccgaggtgaagaagccaggggcatcagtcaaggtgtcatgtaaagcatcaggttatacttttacctcctactggatgaactgggtgaggcaggctccaggacagggcctggagtggatgggaaggatcgacccctacgatagcgagacacactatgctcagaagctgcagggcagagtgaccatgaccacagacacctccacaagcaccgcctatatggagctgaggagcctgcggtctgacgataccgccgtgtactattgcgctcgcggcggctacgacttcgatgtggacacactgtattggttctttgacgtgtggggccagggcaccacagtgaccgtgtccagc

SEQ ID NO: 306 - DNA, 1491 bp, Artificial Sequence
  source: /note="Description of Artificial Sequence: Synthetic h1F3.5Fd-NKG2D_cl1_ScFv(L-H) sequence"
ggcggcagcggcggctccgaggtgcagctggtggagtccggcggcggcctggtgcagcccggcggcagcctgaggctgtcctgcgccgcctctggcttcacctttaacacatacgcaatgaattgggtgcgccaggcaccaggcaagggactggagtgggtggcccggatcagaagcaagtacaacaattatgccacctactatgccgactccgtgaaggatcggtttaccatcagcagagacgattccaagaacacactgtatctgcagatgaatagcctgcgggccgaggatacagccgtgtactattgcgtgagacacggcaactttggcaattcttacgtgagctggttcgcctattggggccagggcaccatggtgacagtgtcctctgcctctaccaagggacctagcgtgttcccactggcacctagctccaagtctaccagcggaggcacagccgccctgggatgtctggtgaaggactactttccagagcccgtgacagtgtcctggaactctggcgccctgaccagcggagtgcacacattccctgccgtgctgcagtctagcggcctgtactccctgtcctctgtggtgaccgtgccaagctcctctctgggcacccagacatatatctgcaacgtgaatcacaagccctctaatacaaaggtggacaagagggtggagcctaagagctgccccccttgtggcggaggcggcagtgatatcgtgctgacacagtctccagccagcctggccgtgagcctgggccaaagagccatcatcagctgcaaggccagccagagcgtgtccttcgccggaagcaacctgatgcactggtaccagcagaaacctggacagcagcctaagctgctgatctaccgggcctctaatctggaagttggagtgcccaccagattcagcggaagcggcagcggcaccgacttcacactgaacattcaccccgtggacgaggacgacgccgccacctattactgtcagcaatcaagagagtaccccttcacctttggcagcggcacaaagctggaaatcaagggcggcggcggcagcggcggcggcggcagcggcggcggaggcagcggcggcggcggaagcgaggtgcagctgcagcagagcggacctgagctggtgaagcctggcgccagcgtgaaaatctcctgcaaggcctctgcctttaacttcacatcttattacctgcactgggtcaagcagggccctggccagggcctggaatggatcggctggatctaccctggcagcggcgacaccaagtacaacgagaagttcaagggcaaggctacactgaccgccgatacctccagctctgctgctaatatgaaactttcttctctgacctctgaggatagcgctgtgtactactgcgccagaaaccggatcttcgacagctactacgtggatagcatggactactggggacagggcaccagcgtgaccgtgtccagctaa

SEQ ID NO: 307 - DNA, 1491 bp, Artificial Sequence
  source: /note="Description of Artificial Sequence: Synthetic h1F3.5Fd-NKG2D_cl1_ScFv(H-L) sequence"
ggcggcagcggcggctccgaggtgcagctggtggagtccggcggcggcctggtgcagcccggcggcagcctgaggctgtcctgcgccgcctctggcttcacctttaacacatacgcaatgaattgggtgcgccaggcaccaggcaagggactggagtgggtggcccggatcagaagcaagtacaacaattatgccacctactatgccgactccgtgaaggatcggtttaccatcagcagagacgattccaagaacacactgtatctgcagatgaatagcctgcgggccgaggatacagccgtgtactattgcgtgagacacggcaactttggcaattcttacgtgagctggttcgcctattggggccagggcaccatggtgacagtgtcctctgcctctaccaagggacctagcgtgttcccactggcacctagctccaagtctaccagcggaggcacagccgccctgggatgtctggtgaaggactactttccagagcccgtgacagtgtcctggaactctggcgccctgaccagcggagtgcacacattccctgccgtgctgcagtctagcggcctgtactccctgtcctctgtggtgaccgtgccaagctcctctctgggcacccagacatatatctgcaacgtgaatcacaagccctctaatacaaaggtggacaagagggtggagcctaagagctgccccccttgtggcggaggcggcagtgaggtgcagctgcagcagagcggacctgagctggtgaagcctggcgccagcgtgaaaatctcctgcaaggcctctgcctttaacttcacatcttattacctgcactgggtcaagcagggccctggccagggcctggaatggatcggctggatctaccctggcagcggcgacaccaagtacaacgagaagttcaagggcaaggctacactgaccgccgatacctccagctctgctgctaatatgaaactttcttctctgacctctgaggatagcgctgtgtactactgcgccagaaaccggatcttcgacagctactacgtggatagcatggactactggggacagggcaccagcgtgaccgtgtccagcggcggcggcggcagcggcggcggcggcagcggcggcggaggcagcggcggcggcggaagcgatatcgtgctgacacagtctccagccagcctggccgtgagcctgggccaaagagccatcatcagctgcaaggccagccagagcgtgtccttcgccggaagcaacctgatgcactggtaccagcagaaacctggacagcagcctaagctgctgatctaccgggcctctaatctggaagttggagtgcccaccagattcagcggaagcggcagcggcaccgacttcacactgaacattcaccccgtggacgaggacgacgccgccacctattactgtcagcaatcaagagagtaccccttcacctttggcagcggcacaaagctggaaatcaagtaa

SEQ ID NO: 308 - DNA, 1491 bp, Artificial Sequence
  source: /note="Description of Artificial Sequence: Synthetic h1F3.5Fd-NKG2D_cl9_ScFv(L-H) sequence"
ggcggcagcggcggctccgaggtgcagctggtggagtccggcggcggcctggtgcagcccggcggcagcctgaggctgtcctgcgccgcctctggcttcacctttaacacatacgcaatgaattgggtgcgccaggcaccaggcaagggactggagtgggtggcccggatcagaagcaagtacaacaattatgccacctactatgccgactccgtgaaggatcggtttaccatcagcagagacgattccaagaacacactgtatctgcagatgaatagcctgcgggccgaggatacagccgtgtactattgcgtgagacacggcaactttggcaattcttacgtgagctggttcgcctattggggccagggcaccatggtgacagtgtcctctgcctctaccaagggacctagcgtgttcccactggcacctagctccaagtctaccagcggaggcacagccgccctgggatgtctggtgaaggactactttccagagcccgtgacagtgtcctggaactctggcgccctgaccagcggagtgcacacattccctgccgtgctgcagtctagcggcctgtactccctgtcctctgtggtgaccgtgccaagctcctctctgggcacccagacatatatctgcaacgtgaatcacaagccctctaatacaaaggtggacaagagggtggagcctaagagctgccccccttgtggcggaggcggcagtgatgtgctgatgacccagacccctctgagcctgcctgtgtctctgggcgaccaggccagcatcagctgcagaagcagccagagcattgtgcacaccaacggcaatacctacctggaatggtacctgcaaaagcctggccagtctcctaagctgctgatctacagagtgttcaacagatttagcggagtgcccgataggttcagcggctctggaagcggcaccgagttcacactgaagatcagccgggtggaagccgaggacctgggcgtgtactactgcttccagggcagccacgtgccattcaccttcggcgctggcaccaagctcgagctgaaaggcggcggcggctctggaggcggcggcagcggcggcggaggtagcggcggaggcggcagcgaggtgaagctgctgcagagcgggggaggactggtgcagcctggcggctctctcaaactgtcttgtgccgcttcaggcatcgacctgagcagatactggatgagctgggttagacgggcccctggaaaaggcctggagtggatcggcgagatcaaccccgacagcagcaccatcaattacgcccccagcctgaaggacaagttcatcatctcccgcgacaacgccaagaacaccctgtctctgcagatgagaaaggtgcggagcgaagatacagccctgtatttctgcatcagaagacggtactacggctcctcctactggtattttgacgtgtggggcacaggcacaacagtgaccgtcagcagttaa

SEQ ID NO: 309 - DNA, 1491 bp, Artificial Sequence
  source: /note="Description of Artificial Sequence: Synthetic h1F3.5Fd-NKG2D_cl9_ScFv(H-L) sequence"
ggcggcagcggcggctccgaggtgcagctggtggagtccggcggcggcctggtgcagcccggcggcagcctgaggctgtcctgcgccgcctctggcttcacctttaacacatacgcaatgaattgggtgcgccaggcaccaggcaagggactggagtgggtggcccggatcagaagcaagtacaacaattatgccacctactatgccgactccgtgaaggatcggtttaccatcagcagagacgattccaagaacacactgtatctgcagatgaatagcctgcgggccgaggatacagccgtgtactattgcgtgagacacggcaactttggcaattcttacgtgagctggttcgcctattggggccagggcaccatggtgacagtgtcctctgcctctaccaagggacctagcgtgttcccactggcacctagctccaagtctaccagcggaggcacagccgccctgggatgtctggtgaaggactactttccagagcccgtgacagtgtcctggaactctggcgccctgaccagcggagtgcacacattccctgccgtgctgcagtctagcggcctgtactccctgtcctctgtggtgaccgtgccaagctcctctctgggcacccagacatatatctgcaacgtgaatcacaagccctctaatacaaaggtggacaagagggtggagcctaagagctgccccccttgtggcggaggcggcagtgaggtgaagctgctgcagagcgggggaggactggtgcagcctggcggctctctcaaactgtcttgtgccgcttcaggcatcgacctgagcagatactggatgagctgggttagacgggcccctggaaaaggcctggagtggatcggcgagatcaaccccgacagcagcaccatcaattacgcccccagcctgaaggacaagttcatcatctcccgcgacaacgccaagaacaccctgtctctgcagatgagaaaggtgcggagcgaagatacagccctgtatttctgcatcagaagacggtactacggctcctcctactggtattttgacgtgtggggcacaggcacaacagtgaccgtcagcagtggcggcggcggctctggaggcggcggcagcggcggcggaggtagcggcggaggcggcagcgatgtgctgatgacccagacccctctgagcctgcctgtgtctctgggcgaccaggccagcatcagctgcagaagcagccagagcattgtgcacaccaacggcaatacctacctggaatggtacctgcaaaagcctggccagtctcctaagctgctgatctacagagtgttcaacagatttagcggagtgcccgataggttcagcggctctggaagcggcaccgagttcacactgaagatcagccgggtggaagccgaggacctgggcgtgtactactgcttccagggcagccacgtgccattcaccttcggcgctggcaccaagctcgagctgaaataa

SEQ ID NO: 310 - DNA, 1488 bp, Artificial Sequence
  source: /note="Description of Artificial Sequence: Synthetic h1F3.5Fd-NKG2D_cl10_ScFv(L-H) sequence"
ggcggcagcggcggctccgaggtgcagctggtggagtccggcggcggcctggtgcagcccggcggcagcctgaggctgtcctgcgccgcctctggcttcacctttaacacatacgcaatgaattgggtgcgccaggcaccaggcaagggactggagtgggtggcccggatcagaagcaagtacaacaattatgccacctactatgccgactccgtgaaggatcggtttaccatcagcagagacgattccaagaacacactgtatctgcagatgaatagcctgcgggccgaggatacagccgtgtactattgcgtgagacacggcaactttggcaattcttacgtgagctggttcgcctattggggccagggcaccatggtgacagtgtcctctgcctctaccaagggacctagcgtgttcccactggcacctagctccaagtctaccagcggaggcacagccgccctgggatgtctggtgaaggactactttccagagcccgtgacagtgtcctggaactctggcgccctgaccagcggagtgcacacattccctgccgtgctgcagtctagcggcctgtactccctgtcctctgtggtgaccgtgccaagctcctctctgggcacccagacatatatctgcaacgtgaatcacaagccctctaatacaaaggtggacaagagggtggagcctaagagctgccccccttgtggcggaggcggcagtgacatcgtgctgacacagagccccgcctccctggccatgtccctgggcaaacgggccacaatcagctgcagagccagcgagagcgtgtctatcatgggcacgaacctgatcaactggtaccagcagaaactcggccaacctcctaagctgctgatctaccacgccagcaacctggagaccggcgttcctgctagatttagcggctccggctctagaacagatttcaccctgaccatcgatccagtggaagaggatgacgtggccgtctactactgcctgcagggcagaaagatccccagaaccttcggcggcggcaccaagctggaaatcaagggaggcggcggatctggcggaggcggaagcggcggcggaggcagcggcggaggcggctctcaggtgcagcttcaacagcctggcgccgagctggtgaaacctggtgcttcagtgaagctgagctgcaaggcttctggctatacctttaccacctactggatccagtggatcaagcagcggcctggccagggcctggaatggatcggagagatcgaccccagcgatattttcacaaattacaaccagaagttcaagggcaaggccaccctgaccgtcgacaccagcagctctaccgcctacatgcagctgagcagcctgaccagcgaggacagcgccgtgtactattgtgcccggggcgtgtacgacggctactacgtgggctacttcgacgtgtggggcacaggcacaacagtgaccgtgtccagctaa

SEQ ID NO: 311 - DNA, 1488 bp, Artificial Sequence
  source: /note="Description of Artificial Sequence: Synthetic h1F3.5Fd-NKG2D_cl10_ScFv(H-L) sequence"
ggcggcagcggcggctccgaggtgcagctggtggagtccggcggcggcctggtgcagcccggcggcagcctgaggctgtcctgcgccgcctctggcttcacctttaacacatacgcaatgaattgggtgcgccaggcaccaggcaagggactggagtgggtggcccggatcagaagcaagtacaacaattatgccacctactatgccgactccgtgaaggatcggtttaccatcagcagagacgattccaagaacacactgtatctgcagatgaatagcctgcgggccgaggatacagccgtgtactattgcgtgagacacggcaactttggcaattcttacgtgagctggttcgcctattggggccagggcaccatggtgacagtgtcctctgcctctaccaagggacctagcgtgttcccactggcacctagctccaagtctaccagcggaggcacagccgccctgggatgtctggtgaaggactactttccagagcccgtgacagtgtcctggaactctggcgccctgaccagcggagtgcacacattccctgccgtgctgcagtctagcggcctgtactccctgtcctctgtggtgaccgtgccaagctcctctctgggcacccagacatatatctgcaacgtgaatcacaagccctctaatacaaaggtggacaagagggtggagcctaagagctgccccccttgtggcggaggcggcagtcaggtgcagcttcaacagcctggcgccgagctggtgaaacctggtgcttcagtgaagctgagctgcaaggcttctggctatacctttaccacctactggatccagtggatcaagcagcggcctggccagggcctggaatggatcggagagatcgaccccagcgatattttcacaaattacaaccagaagttcaagggcaaggccaccctgaccgtcgacaccagcagctctaccgcctacatgcagctgagcagcctgaccagcgaggacagcgccgtgtactattgtgcccggggcgtgtacgacggctactacgtgggctacttcgacgtgtggggcacaggcacaacagtgaccgtgtccagcggaggcggcggatctggcggaggcggaagcggcggcggaggcagcggcggaggcggctctgacatcgtgctgacacagagccccgcctccctggccatgtccctgggcaaacgggccacaatcagctgcagagccagcgagagcgtgtctatcatgggcacgaacctgatcaactggtaccagcagaaactcggccaacctcctaagctgctgatctaccacgccagcaacctggagaccggcgttcctgctagatttagcggctccggctctagaacagatttcaccctgaccatcgatccagtggaagaggatgacgtggccgtctactactgcctgcagggcagaaagatccccagaaccttcggcggcggcaccaagctggaaatcaagtaa

SEQ ID NO: 312 - DNA, 1470 bp, Artificial Sequence
  source: /note="Description of Artificial Sequence: Synthetic h1F3.5Fd-NKG2D_cl19_ScFv(L-H) sequence"
ggcggcagcggcggctccgaggtgcagctggtggagtccggcggcggcctggtgcagcccggcggcagcctgaggctgtcctgcgccgcctctggcttcacctttaacacatacgcaatgaattgggtgcgccaggcaccaggcaagggactggagtgggtggcccggatcagaagcaagtacaacaattatgccacctactatgccgactccgtgaaggatcggtttaccatcagcagagacgattccaagaacacactgtatctgcagatgaatagcctgcgggccgaggatacagccgtgtactattgcgtgagacacggcaactttggcaattcttacgtgagctggttcgcctattggggccagggcaccatggtgacagtgtcctctgcctctaccaagggacctagcgtgttcccactggcacctagctccaagtctaccagcggaggcacagccgccctgggatgtctggtgaaggactactttccagagcccgtgacagtgtcctggaactctggcgccctgaccagcggagtgcacacattccctgccgtgctgcagtctagcggcctgtactccctgtcctctgtggtgaccgtgccaagctcctctctgggcacccagacatatatctgcaacgtgaatcacaagccctctaatacaaaggtggacaagagggtggagcctaagagctgccccccttgtggcggaggcggcagtgacatcctgctgacacagtccccagccatcctgagcgtgtcccccggcgagagagtgtccttcagctgcagagccagccaaagcatcggcaccagcatccactggtaccagcagcggaccaatgtgagccccagactgctgatcaaatacgctagcgagagcatcagcggcatccccagcaggttcagcggcagcggcagcggaaccgatttcaccctgagcatcaacaacgtcgagagtgaagatatcgccgattactactgtcagcacagcaacagatggcctctgaccttcggcgccggcacaaagctggaactgaagggcggcggcggcagcggaggaggaggctctggcggaggcggctctggcggcggcggaagccaggtgcagctgaaggaaagcggtcctggactcgtggccccttctcagtctctgtctatcacatgcaccgtgtccggcttttctcttacaagctacgctatcagctggttccggcagcctcctggcaagggcctggagtgcctgggcgtgatctggaccggcggcggaacaaattacaacagcgtgtttaagtctagactgagcattatcaaggacaactccaagagccaagttttcctgaaaatgaacagcctgcagaccgacgacaccgcccggtactactgtgccagaaagggcgacgagggatattggggctacttcgacgtgtggggcacaggcaccaccgtgaccgtgtctagctaa

SEQ ID NO: 313 - DNA, 1470 bp, Artificial Sequence
  source: /note="Description of Artificial Sequence: Synthetic h1F3.5Fd-NKG2D_cl19_ScFv(H-L) sequence"
ggcggcagcggcggctccgaggtgcagctggtggagtccggcggcggcctggtgcagcccggcggcagcctgaggctgtcctgcgccgcctctggcttcacctttaacacatacgcaatgaattgggtgcgccaggcaccaggcaagggactggagtgggtggcccggatcagaagcaagtacaacaattatgccacctactatgccgactccgtgaaggatcggtttaccatcagcagagacgattccaagaacacactgtatctgcagatgaatagcctgcgggccgaggatacagccgtgtactattgcgtgagacacggcaactttggcaattcttacgtgagctggttcgcctattggggccagggcaccatggtgacagtgtcctctgcctctaccaagggacctagcgtgttcccactggcacctagctccaagtctaccagcggaggcacagccgccctgggatgtctggtgaaggactactttccagagcccgtgacagtgtcctggaactctggcgccctgaccagcggagtgcacacattccctgccgtgctgcagtctagcggcctgtactccctgtcctctgtggtgaccgtgccaagctcctctctgggcacccagacatatatctgcaacgtgaatcacaagccctctaatacaaaggtggacaagagggtggagcctaagagctgccccccttgtggcggaggcggcagtcaggtgcagctgaaggaaagcggtcctggactcgtggccccttctcagtctctgtctatcacatgcaccgtgtccggcttttctcttacaagctacgctatcagctggttccggcagcctcctggcaagggcctggagtgcctgggcgtgatctggaccggcggcggaacaaattacaacagcgtgtttaagtctagactgagcattatcaaggacaactccaagagccaagttttcctgaaaatgaacagcctgcagaccgacgacaccgcccggtactactgtgccagaaagggcgacgagggatattggggctacttcgacgtgtggggcacaggcaccaccgtgaccgtgtctagcggcggcggcggcagcggaggaggaggctctggcggaggcggctctggcggcggcggaagcgacatcctgctgacacagtccccagccatcctgagcgtgtcccccggcgagagagtgtccttcagctgcagagccagccaaagcatcggcaccagcatccactggtaccagcagcggaccaatgtgagccccagactgctgatcaaatacgctagcgagagcatcagcggcatccccagcaggttcagcggcagcggcagcggaaccgatttcaccctgagcatcaacaacgtcgagagtgaagatatcgccgattactactgtcagcacagcaacagatggcctctgaccttcggcgccggcacaaagctggaactgaagtaa

SEQ ID NO: 314 - DNA, 1743 bp, Artificial Sequence
  source: /note="Description of Artificial Sequence: Synthetic h1F3.5Fd- NKG2A_ScFv(L-H)_MC2_32GS-Acap3.1 sequence"
ggcggcagcggcggctccgaggtgcagctggtggagtccggcggcggcctggtgcagcccggcggcagcctgaggctgtcctgcgccgcctctggcttcacctttaacacatacgcaatgaattgggtgcgccaggcaccaggcaagggactggagtgggtggcccggatcagaagcaagtacaacaattatgccacctactatgccgactccgtgaaggatcggtttaccatcagcagagacgattccaagaacacactgtatctgcagatgaatagcctgcgggccgaggatacagccgtgtactattgcgtgagacacggcaactttggcaattcttacgtgagctggttcgcctattggggccagggcaccatggtgacagtgtcctctgcctctaccaagggacctagcgtgttcccactggcacctagctccaagtctaccagcggaggcacagccgccctgggatgtctggtgaaggactactttccagagcccgtgacagtgtcctggaactctggcgccctgaccagcggagtgcacacattccctgccgtgctgcagtctagcggcctgtactccctgtcctctgtggtgaccgtgccaagctcctctctgggcacccagacatatatctgcaacgtgaatcacaagccctctaatacaaaggtggacaagagggtggagcctaagagctgccccccttgtggcggaggcggtagcgacatccagatgacacagtctccctcttccctgtctgcttccgtgggcgatagagtgacaatcacctgtcgcgccagcgagaacatctactcttatctggcttggtaccagcagaagcccggcaaggcccctaagctgctgatctataatgccaagacactggctgagggcgtgccttccaggttcagcggatctggatccggaaccgactttacactgaccatcagctctctgcagccagaggattttgccacatactattgccagcatcattacggaacaccaagaacattcggcgggggaacaaaagtggaaatcaagggcggaggcgggtctggaggtggagggagtggaggaggggggagcggtgggggaggtagccaggtccagctggtgcagtcaggagccgaggtgaagaagccaggggcatcagtcaaggtgtcatgtaaagcatcaggttatacttttacctcctactggatgaactgggtgaggcaggctccaggacagggcctggagtggatgggaaggatcgacccctacgatagcgagacacactatgctcagaagctgcagggcagagtgaccatgaccacagacacctccacaagcaccgcctatatggagctgaggagcctgcggtctgacgataccgccgtgtactattgcgctcgcggcggctacgacttcgatgtgggcacactgtattggttctttgacgtgtggggccagggcaccacagtgaccgtgtccagcggtggtagcggcggcagtcctctgggactggcgggcctttctggcagaagcgacaatcacggtggaggaggtagtggtggtggcggatctggaggaggtggcagtggcggtggaggttcaggcggttccggaggttccctgagcatcgacaacgaggaggagatgaagttcctgagcatcatcagccctagcagctggatcggcgtgttcaactccgccgtgctgcaagtgaacagactgaagagcgctcagtccggctaa

SEQ ID NO: 315 - DNA, 1773 bp, Artificial Sequence
  source: /note="Description of Artificial Sequence: Synthetic h1F3.5Fd- NKG2A_ScFv(L-H)_MC2_42GS-Acap3.1 sequence"
ggcggcagcggcggctccgaggtgcagctggtggagtccggcggcggcctggtgcagcccggcggcagcctgaggctgtcctgcgccgcctctggcttcacctttaacacatacgcaatgaattgggtgcgccaggcaccaggcaagggactggagtgggtggcccggatcagaagcaagtacaacaattatgccacctactatgccgactccgtgaaggatcggtttaccatcagcagagacgattccaagaacacactgtatctgcagatgaatagcctgcgggccgaggatacagccgtgtactattgcgtgagacacggcaactttggcaattcttacgtgagctggttcgcctattggggccagggcaccatggtgacagtgtcctctgcctctaccaagggacctagcgtgttcccactggcacctagctccaagtctaccagcggaggcacagccgccctgggatgtctggtgaaggactactttccagagcccgtgacagtgtcctggaactctggcgccctgaccagcggagtgcacacattccctgccgtgctgcagtctagcggcctgtactccctgtcctctgtggtgaccgtgccaagctcctctctgggcacccagacatatatctgcaacgtgaatcacaagccctctaatacaaaggtggacaagagggtggagcctaagagctgccccccttgtggcggaggcggtagcgacatccagatgacacagtctccctcttccctgtctgcttccgtgggcgatagagtgacaatcacctgtcgcgccagcgagaacatctactcttatctggcttggtaccagcagaagcccggcaaggcccctaagctgctgatctataatgccaagacactggctgagggcgtgccttccaggttcagcggatctggatccggaaccgactttacactgaccatcagctctctgcagccagaggattttgccacatactattgccagcatcattacggaacaccaagaacattcggcgggggaacaaaagtggaaatcaagggcggaggcgggtctggaggtggagggagtggaggaggggggagcggtgggggaggtagccaggtccagctggtgcagtcaggagccgaggtgaagaagccaggggcatcagtcaaggtgtcatgtaaagcatcaggttatacttttacctcctactggatgaactgggtgaggcaggctccaggacagggcctggagtggatgggaaggatcgacccctacgatagcgagacacactatgctcagaagctgcagggcagagtgaccatgaccacagacacctccacaagcaccgcctatatggagctgaggagcctgcggtctgacgataccgccgtgtactattgcgctcgcggcggctacgacttcgatgtgggcacactgtattggttctttgacgtgtggggccagggcaccacagtgaccgtgtccagcggtggtagcggcggcagtcctctgggactggcgggcctttctggcagaagcgacaatcacggtggaggaggtagtggtggtggcggatctggaggaggtggcagtggcggtggaggttcaggaggtggaggctctggcggaggtggtagtggcggttccggaggttccctgagcatcgacaacgaggaggagatgaagttcctgagcatcatcagccctagcagctggatcggcgtgttcaactccgccgtgctgcaagtgaacagactgaagagcgctcagtccggctaa

SEQ ID NO: 316 - DNA, 1713 bp, Artificial Sequence
  source: /note="Description of Artificial Sequence: Synthetic h1F3.5Fd- NKG2A_ScFv(L-H)_MC2_32GS-Acap4.1 sequence"
ggcggcagcggcggctccgaggtgcagctggtggagtccggcggcggcctggtgcagcccggcggcagcctgaggctgtcctgcgccgcctctggcttcacctttaacacatacgcaatgaattgggtgcgccaggcaccaggcaagggactggagtgggtggcccggatcagaagcaagtacaacaattatgccacctactatgccgactccgtgaaggatcggtttaccatcagcagagacgattccaagaacacactgtatctgcagatgaatagcctgcgggccgaggatacagccgtgtactattgcgtgagacacggcaactttggcaattcttacgtgagctggttcgcctattggggccagggcaccatggtgacagtgtcctctgcctctaccaagggacctagcgtgttcccactggcacctagctccaagtctaccagcggaggcacagccgccctgggatgtctggtgaaggactactttccagagcccgtgacagtgtcctggaactctggcgccctgaccagcggagtgcacacattccctgccgtgctgcagtctagcggcctgtactccctgtcctctgtggtgaccgtgccaagctcctctctgggcacccagacatatatctgcaacgtgaatcacaagccctctaatacaaaggtggacaagagggtggagcctaagagctgccccccttgtggcggaggcggtagcgacatccagatgacacagtctccctcttccctgtctgcttccgtgggcgatagagtgacaatcacctgtcgcgccagcgagaacatctactcttatctggcttggtaccagcagaagcccggcaaggcccctaagctgctgatctataatgccaagacactggctgagggcgtgccttccaggttcagcggatctggatccggaaccgactttacactgaccatcagctctctgcagccagaggattttgccacatactattgccagcatcattacggaacaccaagaacattcggcgggggaacaaaagtggaaatcaagggcggaggcgggtctggaggtggagggagtggaggaggggggagcggtgggggaggtagccaggtccagctggtgcagtcaggagccgaggtgaagaagccaggggcatcagtcaaggtgtcatgtaaagcatcaggttatacttttacctcctactggatgaactgggtgaggcaggctccaggacagggcctggagtggatgggaaggatcgacccctacgatagcgagacacactatgctcagaagctgcagggcagagtgaccatgaccacagacacctccacaagcaccgcctatatggagctgaggagcctgcggtctgacgataccgccgtgtactattgcgctcgcggcggctacgacttcgatgtgggcacactgtattggttctttgacgtgtggggccagggcaccacagtgaccgtgtccagcggtggtagcggcggcagtcctctgggactggcgggcctttctggcagaagcgacaatcacggtggaggaggtagtggtggtggcggatctggaggaggtggcagtggcggtggaggttcaggcggttccggaggttccgcattcaagcatgaaatcaaggatagtgacaatgctgagctaaacagcgccgtgctgcaagtgaacagactgaagagcgctcagtccggctaa

SEQ ID NO: 317 - DNA, 1743 bp, Artificial Sequence
  source: /note="Description of Artificial Sequence: Synthetic h1F3.5Fd- NKG2A_ScFv(L-H)_MC2_42GS-Acap4.1 sequence"
ggcggcagcggcggctccgaggtgcagctggtggagtccggcggcggcctggtgcagcccggcggcagcctgaggctgtcctgcgccgcctctggcttcacctttaacacatacgcaatgaattgggtgcgccaggcaccaggcaagggactggagtgggtggcccggatcagaagcaagtacaacaattatgccacctactatgccgactccgtgaaggatcggtttaccatcagcagagacgattccaagaacacactgtatctgcagatgaatagcctgcgggccgaggatacagccgtgtactattgcgtgagacacggcaactttggcaattcttacgtgagctggttcgcctattggggccagggcaccatggtgacagtgtcctctgcctctaccaagggacctagcgtgttcccactggcacctagctccaagtctaccagcggaggcacagccgccctgggatgtctggtgaaggactactttccagagcccgtgacagtgtcctggaactctggcgccctgaccagcggagtgcacacattccctgccgtgctgcagtctagcggcctgtactccctgtcctctgtggtgaccgtgccaagctcctctctgggcacccagacatatatctgcaacgtgaatcacaagccctctaatacaaaggtggacaagagggtggagcctaagagctgccccccttgtggcggaggcggtagcgacatccagatgacacagtctccctcttccctgtctgcttccgtgggcgatagagtgacaatcacctgtcgcgccagcgagaacatctactcttatctggcttggtaccagcagaagcccggcaaggcccctaagctgctgatctataatgccaagacactggctgagggcgtgccttccaggttcagcggatctggatccggaaccgactttacactgaccatcagctctctgcagccagaggattttgccacatactattgccagcatcattacggaacaccaagaacattcggcgggggaacaaaagtggaaatcaagggcggaggcgggtctggaggtggagggagtggaggaggggggagcggtgggggaggtagccaggtccagctggtgcagtcaggagccgaggtgaagaagccaggggcatcagtcaaggtgtcatgtaaagcatcaggttatacttttacctcctactggatgaactgggtgaggcaggctccaggacagggcctggagtggatgggaaggatcgacccctacgatagcgagacacactatgctcagaagctgcagggcagagtgaccatgaccacagacacctccacaagcaccgcctatatggagctgaggagcctgcggtctgacgataccgccgtgtactattgcgctcgcggcggctacgacttcgatgtgggcacactgtattggttctttgacgtgtggggccagggcaccacagtgaccgtgtccagcggtggtagcggcggcagtcctctgggactggcgggcctttctggcagaagcgacaatcacggtggaggaggtagtggtggtggcggatctggaggaggtggcagtggcggtggaggttcaggaggtggaggctctggcggaggtggtagtggcggttccggaggttccgcattcaagcatgaaatcaaggatagtgacaatgctgagctaaacagcgccgtgctgcaagtgaacagactgaagagcgctcagtccggctaa

SEQ ID NO: 318 - DNA, 1668 bp, Artificial Sequence
  source: /note="Description of Artificial Sequence: Synthetic h1F3.5Fd- NKG2A_ScFv(L-H)_MC2_32GS-Acap9 sequence"
ggcggcagcggcggctccgaggtgcagctggtggagtccggcggcggcctggtgcagcccggcggcagcctgaggctgtcctgcgccgcctctggcttcacctttaacacatacgcaatgaattgggtgcgccaggcaccaggcaagggactggagtgggtggcccggatcagaagcaagtacaacaattatgccacctactatgccgactccgtgaaggatcggtttaccatcagcagagacgattccaagaacacactgtatctgcagatgaatagcctgcgggccgaggatacagccgtgtactattgcgtgagacacggcaactttggcaattcttacgtgagctggttcgcctattggggccagggcaccatggtgacagtgtcctctgcctctaccaagggacctagcgtgttcccactggcacctagctccaagtctaccagcggaggcacagccgccctgggatgtctggtgaaggactactttccagagcccgtgacagtgtcctggaactctggcgccctgaccagcggagtgcacacattccctgccgtgctgcagtctagcggcctgtactccctgtcctctgtggtgaccgtgccaagctcctctctgggcacccagacatatatctgcaacgtgaatcacaagccctctaatacaaaggtggacaagagggtggagcctaagagctgccccccttgtggcggaggcggtagcgacatccagatgacacagtctccctcttccctgtctgcttccgtgggcgatagagtgacaatcacctgtcgcgccagcgagaacatctactcttatctggcttggtaccagcagaagcccggcaaggcccctaagctgctgatctataatgccaagacactggctgagggcgtgccttccaggttcagcggatctggatccggaaccgactttacactgaccatcagctctctgcagccagaggattttgccacatactattgccagcatcattacggaacaccaagaacattcggcgggggaacaaaagtggaaatcaagggcggaggcgggtctggaggtggagggagtggaggaggggggagcggtgggggaggtagccaggtccagctggtgcagtcaggagccgaggtgaagaagccaggggcatcagtcaaggtgtcatgtaaagcatcaggttatacttttacctcctactggatgaactgggtgaggcaggctccaggacagggcctggagtggatgggaaggatcgacccctacgatagcgagacacactatgctcagaagctgcagggcagagtgaccatgaccacagacacctccacaagcaccgcctatatggagctgaggagcctgcggtctgacgataccgccgtgtactattgcgctcgcggcggctacgacttcgatgtgggcacactgtattggttctttgacgtgtggggccagggcaccacagtgaccgtgtccagcggtggtagcggcggcagtcctctgggactggcgggcctttctggcagaagcgacaatcacggtggaggaggtagtggtggtggcggatctggaggaggtggcagtggcggtggaggttcaggcggttccggaggttccgctagacattgtggacatagtccagaagagtggataacttattcgtaa

SEQ ID NO: 319 - DNA, 3651 bp, Artificial Sequence
  source: /note="Description of Artificial Sequence: Synthetic CD3cap137-ALB-MC2-h1F3.5Fd- NKG2A(L-H)-MC2-32GS-Acap3.1 sequence"
caggacggcaacgaggagatgggcggcatcacccagacaccatacaaggtgagcatctccggcaccacagtgatcctgaccggaggaggcagcggaggaggctccggaggcggctctgaggtggcccacaggttcaaggatctgggcgaggagaacttcaaggccctggtgctgatcgccttcgcccagtatctgcagcagtgcccctttgaggaccacgtgaagctggtgaacgaggtgaccgagttcgccaagacatgcgtggccgacgagtccgccgagaattgtgataagtctctgcacaccctgtttggcgataagctgtgcaccgtggccacactgagggagacatacggcgagatggccgactgctgtgccaagcaggagcccgagcgcaacgagtgcttcctgcagcacaaggacgataaccctaatctgccacggctggtgagacctgaggtggacgtgatgtgcaccgccttccacgataatgaggagacatttctgaagaagtacctgtatgagatcgcccggagacacccttacttttatgccccagagctgctgttctttgccaagcggtacaaggcagccttcaccgagtgctgtcaggcagcagataaagcagcatgcctgctgccaaagctggacgagctgagggatgagggcaaggcaagctccgccaagcagcgcctgaagtgtgcaagcctgcagaagttcggagagagggcctttaaggcatgggcagtggcaaggctgtcccagcggttcccaaaggccgagtttgccgaggtgtctaagctggtgaccgacctgacaaaggtgcacaccgagtgctgtcacggcgacctgctggagtgcgcagacgatagagccgatctggccaagtacatctgtgagaaccaggactctatctctagcaagctgaaggagtgctgtgagaagcccctgctggagaagtcccactgcatcgccgaggtggagaacgacgagatgccagcagatctgccaagcctggcagcagacttcgtggagtccaaggacgtgtgcaagaattacgccgaggccaaggacgtgttcctgggcatgtttctgtacgagtatgccaggcgccaccctgactactccgtggtgctgctgctgcggctggccaagacctatgagaccacactggagaagtgctgtgccgccgccgacccccacgagtgctatgcaaaggtgttcgacgagtttaagcccctggtggaggagcctcagaacctgatcaagcagaattgtgagctgtttgagcagctgggcgagtacaagttccagaacgccctgctggtgagatataccaagaaggtgccacaggtgtctacccccacactggtggaggtgagccggaatctgggcaaggtcggctccaagtgctgtaagcaccctgaggccaagagaatgccatgcgccgaggattacctgtccgtggtgctgaaccagctgtgcgtgctgcacgagaagacccccgtgagcgacagggtgaccaagtgctgtacagagtctctggtgaaccggagaccatgctttagcgccctggaggtggatgagacatatgtgcccaaggagttcaatgccgagaccttcacatttcacgccgacatctgtaccctgagcgagaaggagcgccagatcaagaagcagacagccctggtggagctggtgaagcacaagccaaaggccaccaaggagcagctgaaggccgtgatggacgatttcgccgcctttgtggagaagtgctgtaaggccgacgataaggagacatgcttcgcagaggagggcaagaagctggtggcagcaagccaggcagcaggaggctccggcggctctccactgggcctggccggcctgagcggccggagcgacaaccacggcggcagcggcggctccgaggtgcagctggtggagtccggcggcggcctggtgcagcccggcggcagcctgaggctgtcctgcgccgcctctggcttcacctttaacacatacgcaatgaattgggtgcgccaggcaccaggcaagggactggagtgggtggcccggatcagaagcaagtacaacaattatgccacctactatgccgactccgtgaaggatcggtttaccatcagcagagacgattccaagaacacactgtatctgcagatgaatagcctgcgggccgaggatacagccgtgtactattgcgtgagacacggcaactttggcaattcttacgtgagctggttcgcctattggggccagggcaccatggtgacagtgtcctctgcctctaccaagggacctagcgtgttcccactggcacctagctccaagtctaccagcggaggcacagccgccctgggatgtctggtgaaggactactttccagagcccgtgacagtgtcctggaactctggcgccctgaccagcggagtgcacacattccctgccgtgctgcagtctagcggcctgtactccctgtcctctgtggtgaccgtgccaagctcctctctgggcacccagacatatatctgcaacgtgaatcacaagccctctaatacaaaggtggacaagagggtggagcctaagagctgccccccttgtggcggaggcggtagcgacatccagatgacacagtctccctcttccctgtctgcttccgtgggcgatagagtgacaatcacctgtcgcgccagcgagaacatctactcttatctggcttggtaccagcagaagcccggcaaggcccctaagctgctgatctataatgccaagacactggctgagggcgtgccttccaggttcagcggatctggatccggaaccgactttacactgaccatcagctctctgcagccagaggattttgccacatactattgccagcatcattacggaacaccaagaacattcggcgggggaacaaaagtggaaatcaagggcggaggcgggtctggaggtggagggagtggaggaggggggagcggtgggggaggtagccaggtccagctggtgcagtcaggagccgaggtgaagaagccaggggcatcagtcaaggtgtcatgtaaagcatcaggttatacttttacctcctactggatgaactgggtgaggcaggctccaggacagggcctggagtggatgggaaggatcgacccctacgatagcgagacacactatgctcagaagctgcagggcagagtgaccatgaccacagacacctccacaagcaccgcctatatggagctgaggagcctgcggtctgacgataccgccgtgtactattgcgctcgcggcggctacgacttcgatgtgggcacactgtattggttctttgacgtgtggggccagggcaccacagtgaccgtgtccagcggtggtagcggcggcagtcctctgggactggcgggcctttctggcagaagcgacaatcacggtggaggaggtagtggtggtggcggatctggaggaggtggcagtggcggtggaggttcaggcggttccggaggttccctgagcatcgacaacgaggaggagatgaagttcctgagcatcatcagccctagcagctggatcggcgtgttcaactccgccgtgctgcaagtgaacagactgaagagcgctcagtccggctaa

SEQ ID NO: 320 - DNA, 3681 bp, Artificial Sequence
  source: /note="Description of Artificial Sequence: Synthetic CD3cap137-ALB-MC2-h1F3.5Fd- NKG2A(L-H)-MC2-42GS-Acap3.1 sequence"
caggacggcaacgaggagatgggcggcatcacccagacaccatacaaggtgagcatctccggcaccacagtgatcctgaccggaggaggcagcggaggaggctccggaggcggctctgaggtggcccacaggttcaaggatctgggcgaggagaacttcaaggccctggtgctgatcgccttcgcccagtatctgcagcagtgcccctttgaggaccacgtgaagctggtgaacgaggtgaccgagttcgccaagacatgcgtggccgacgagtccgccgagaattgtgataagtctctgcacaccctgtttggcgataagctgtgcaccgtggccacactgagggagacatacggcgagatggccgactgctgtgccaagcaggagcccgagcgcaacgagtgcttcctgcagcacaaggacgataaccctaatctgccacggctggtgagacctgaggtggacgtgatgtgcaccgccttccacgataatgaggagacatttctgaagaagtacctgtatgagatcgcccggagacacccttacttttatgccccagagctgctgttctttgccaagcggtacaaggcagccttcaccgagtgctgtcaggcagcagataaagcagcatgcctgctgccaaagctggacgagctgagggatgagggcaaggcaagctccgccaagcagcgcctgaagtgtgcaagcctgcagaagttcggagagagggcctttaaggcatgggcagtggcaaggctgtcccagcggttcccaaaggccgagtttgccgaggtgtctaagctggtgaccgacctgacaaaggtgcacaccgagtgctgtcacggcgacctgctggagtgcgcagacgatagagccgatctggccaagtacatctgtgagaaccaggactctatctctagcaagctgaaggagtgctgtgagaagcccctgctggagaagtcccactgcatcgccgaggtggagaacgacgagatgccagcagatctgccaagcctggcagcagacttcgtggagtccaaggacgtgtgcaagaattacgccgaggccaaggacgtgttcctgggcatgtttctgtacgagtatgccaggcgccaccctgactactccgtggtgctgctgctgcggctggccaagacctatgagaccacactggagaagtgctgtgccgccgccgacccccacgagtgctatgcaaaggtgttcgacgagtttaagcccctggtggaggagcctcagaacctgatcaagcagaattgtgagctgtttgagcagctgggcgagtacaagttccagaacgccctgctggtgagatataccaagaaggtgccacaggtgtctacccccacactggtggaggtgagccggaatctgggcaaggtcggctccaagtgctgtaagcaccctgaggccaagagaatgccatgcgccgaggattacctgtccgtggtgctgaaccagctgtgcgtgctgcacgagaagacccccgtgagcgacagggtgaccaagtgctgtacagagtctctggtgaaccggagaccatgctttagcgccctggaggtggatgagacatatgtgcccaaggagttcaatgccgagaccttcacatttcacgccgacatctgtaccctgagcgagaaggagcgccagatcaagaagcagacagccctggtggagctggtgaagcacaagccaaaggccaccaaggagcagctgaaggccgtgatggacgatttcgccgcctttgtggagaagtgctgtaaggccgacgataaggagacatgcttcgcagaggagggcaagaagctggtggcagcaagccaggcagcaggaggctccggcggctctccactgggcctggccggcctgagcggccggagcgacaaccacggcggcagcggcggctccgaggtgcagctggtggagtccggcggcggcctggtgcagcccggcggcagcctgaggctgtcctgcgccgcctctggcttcacctttaacacatacgcaatgaattgggtgcgccaggcaccaggcaagggactggagtgggtggcccggatcagaagcaagtacaacaattatgccacctactatgccgactccgtgaaggatcggtttaccatcagcagagacgattccaagaacacactgtatctgcagatgaatagcctgcgggccgaggatacagccgtgtactattgcgtgagacacggcaactttggcaattcttacgtgagctggttcgcctattggggccagggcaccatggtgacagtgtcctctgcctctaccaagggacctagcgtgttcccactggcacctagctccaagtctaccagcggaggcacagccgccctgggatgtctggtgaaggactactttccagagcccgtgacagtgtcctggaactctggcgccctgaccagcggagtgcacacattccctgccgtgctgcagtctagcggcctgtactccctgtcctctgtggtgaccgtgccaagctcctctctgggcacccagacatatatctgcaacgtgaatcacaagccctctaatacaaaggtggacaagagggtggagcctaagagctgccccccttgtggcggaggcggtagcgacatccagatgacacagtctccctcttccctgtctgcttccgtgggcgatagagtgacaatcacctgtcgcgccagcgagaacatctactcttatctggcttggtaccagcagaagcccggcaaggcccctaagctgctgatctataatgccaagacactggctgagggcgtgccttccaggttcagcggatctggatccggaaccgactttacactgaccatcagctctctgcagccagaggattttgccacatactattgccagcatcattacggaacaccaagaacattcggcgggggaacaaaagtggaaatcaagggcggaggcgggtctggaggtggagggagtggaggaggggggagcggtgggggaggtagccaggtccagctggtgcagtcaggagccgaggtgaagaagccaggggcatcagtcaaggtgtcatgtaaagcatcaggttatacttttacctcctactggatgaactgggtgaggcaggctccaggacagggcctggagtggatgggaaggatcgacccctacgatagcgagacacactatgctcagaagctgcagggcagagtgaccatgaccacagacacctccacaagcaccgcctatatggagctgaggagcctgcggtctgacgataccgccgtgtactattgcgctcgcggcggctacgacttcgatgtgggcacactgtattggttctttgacgtgtggggccagggcaccacagtgaccgtgtccagcggtggtagcggcggcagtcctctgggactggcgggcctttctggcagaagcgacaatcacggtggaggaggtagtggtggtggcggatctggaggaggtggcagtggcggtggaggttcaggaggtggaggctctggcggaggtggtagtggcggttccggaggttccctgagcatcgacaacgaggaggagatgaagttcctgagcatcatcagccctagcagctggatcggcgtgttcaactccgccgtgctgcaagtgaacagactgaagagcgctcagtccggctaa

SEQ ID NO: 321 - DNA, 3621 bp, Artificial Sequence
  source: /note="Description of Artificial Sequence: Synthetic CD3cap137-ALB-MC2-h1F3.5Fd- NKG2A(L-H)-MC2-32GS-Acap4.1 sequence"
caggacggcaacgaggagatgggcggcatcacccagacaccatacaaggtgagcatctccggcaccacagtgatcctgaccggaggaggcagcggaggaggctccggaggcggctctgaggtggcccacaggttcaaggatctgggcgaggagaacttcaaggccctggtgctgatcgccttcgcccagtatctgcagcagtgcccctttgaggaccacgtgaagctggtgaacgaggtgaccgagttcgccaagacatgcgtggccgacgagtccgccgagaattgtgataagtctctgcacaccctgtttggcgataagctgtgcaccgtggccacactgagggagacatacggcgagatggccgactgctgtgccaagcaggagcccgagcgcaacgagtgcttcctgcagcacaaggacgataaccctaatctgccacggctggtgagacctgaggtggacgtgatgtgcaccgccttccacgataatgaggagacatttctgaagaagtacctgtatgagatcgcccggagacacccttacttttatgccccagagctgctgttctttgccaagcggtacaaggcagccttcaccgagtgctgtcaggcagcagataaagcagcatgcctgctgccaaagctggacgagctgagggatgagggcaaggcaagctccgccaagcagcgcctgaagtgtgcaagcctgcagaagttcggagagagggcctttaaggcatgggcagtggcaaggctgtcccagcggttcccaaaggccgagtttgccgaggtgtctaagctggtgaccgacctgacaaaggtgcacaccgagtgctgtcacggcgacctgctggagtgcgcagacgatagagccgatctggccaagtacatctgtgagaaccaggactctatctctagcaagctgaaggagtgctgtgagaagcccctgctggagaagtcccactgcatcgccgaggtggagaacgacgagatgccagcagatctgccaagcctggcagcagacttcgtggagtccaaggacgtgtgcaagaattacgccgaggccaaggacgtgttcctgggcatgtttctgtacgagtatgccaggcgccaccctgactactccgtggtgctgctgctgcggctggccaagacctatgagaccacactggagaagtgctgtgccgccgccgacccccacgagtgctatgcaaaggtgttcgacgagtttaagcccctggtggaggagcctcagaacctgatcaagcagaattgtgagctgtttgagcagctgggcgagtacaagttccagaacgccctgctggtgagatataccaagaaggtgccacaggtgtctacccccacactggtggaggtgagccggaatctgggcaaggtcggctccaagtgctgtaagcaccctgaggccaagagaatgccatgcgccgaggattacctgtccgtggtgctgaaccagctgtgcgtgctgcacgagaagacccccgtgagcgacagggtgaccaagtgctgtacagagtctctggtgaaccggagaccatgctttagcgccctggaggtggatgagacatatgtgcccaaggagttcaatgccgagaccttcacatttcacgccgacatctgtaccctgagcgagaaggagcgccagatcaagaagcagacagccctggtggagctggtgaagcacaagccaaaggccaccaaggagcagctgaaggccgtgatggacgatttcgccgcctttgtggagaagtgctgtaaggccgacgataaggagacatgcttcgcagaggagggcaagaagctggtggcagcaagccaggcagcaggaggctccggcggctctccactgggcctggccggcctgagcggccggagcgacaaccacggcggcagcggcggctccgaggtgcagctggtggagtccggcggcggcctggtgcagcccggcggcagcctgaggctgtcctgcgccgcctctggcttcacctttaacacatacgcaatgaattgggtgcgccaggcaccaggcaagggactggagtgggtggcccggatcagaagcaagtacaacaattatgccacctactatgccgactccgtgaaggatcggtttaccatcagcagagacgattccaagaacacactgtatctgcagatgaatagcctgcgggccgaggatacagccgtgtactattgcgtgagacacggcaactttggcaattcttacgtgagctggttcgcctattggggccagggcaccatggtgacagtgtcctctgcctctaccaagggacctagcgtgttcccactggcacctagctccaagtctaccagcggaggcacagccgccctgggatgtctggtgaaggactactttccagagcccgtgacagtgtcctggaactctggcgccctgaccagcggagtgcacacattccctgccgtgctgcagtctagcggcctgtactccctgtcctctgtggtgaccgtgccaagctcctctctgggcacccagacatatatctgcaacgtgaatcacaagccctctaatacaaaggtggacaagagggtggagcctaagagctgccccccttgtggcggaggcggtagcgacatccagatgacacagtctccctcttccctgtctgcttccgtgggcgatagagtgacaatcacctgtcgcgccagcgagaacatctactcttatctggcttggtaccagcagaagcccggcaaggcccctaagctgctgatctataatgccaagacactggctgagggcgtgccttccaggttcagcggatctggatccggaaccgactttacactgaccatcagctctctgcagccagaggattttgccacatactattgccagcatcattacggaacaccaagaacattcggcgggggaacaaaagtggaaatcaagggcggaggcgggtctggaggtggagggagtggaggaggggggagcggtgggggaggtagccaggtccagctggtgcagtcaggagccgaggtgaagaagccaggggcatcagtcaaggtgtcatgtaaagcatcaggttatacttttacctcctactggatgaactgggtgaggcaggctccaggacagggcctggagtggatgggaaggatcgacccctacgatagcgagacacactatgctcagaagctgcagggcagagtgaccatgaccacagacacctccacaagcaccgcctatatggagctgaggagcctgcggtctgacgataccgccgtgtactattgcgctcgcggcggctacgacttcgatgtgggcacactgtattggttctttgacgtgtggggccagggcaccacagtgaccgtgtccagcggtggtagcggcggcagtcctctgggactggcgggcctttctggcagaagcgacaatcacggtggaggaggtagtggtggtggcggatctggaggaggtggcagtggcggtggaggttcaggcggttccggaggttccgcattcaagcatgaaatcaaggatagtgacaatgctgagctaaacagcgccgtgctgcaagtgaacagactgaagagcgctcagtccggctaa

SEQ ID NO: 322 - DNA, 3651 bp, Artificial Sequence
  source: /note="Description of Artificial Sequence: Synthetic CD3cap137-ALB-MC2-h1F3.5Fd- NKG2A(L-H)-MC2-42GS-Acap4.1 sequence"
caggacggcaacgaggagatgggcggcatcacccagacaccatacaaggtgagcatctccggcaccacagtgatcctgaccggaggaggcagcggaggaggctccggaggcggctctgaggtggcccacaggttcaaggatctgggcgaggagaacttcaaggccctggtgctgatcgccttcgcccagtatctgcagcagtgcccctttgaggaccacgtgaagctggtgaacgaggtgaccgagttcgccaagacatgcgtggccgacgagtccgccgagaattgtgataagtctctgcacaccctgtttggcgataagctgtgcaccgtggccacactgagggagacatacggcgagatggccgactgctgtgccaagcaggagcccgagcgcaacgagtgcttcctgcagcacaaggacgataaccctaatctgccacggctggtgagacctgaggtggacgtgatgtgcaccgccttccacgataatgaggagacatttctgaagaagtacctgtatgagatcgcccggagacacccttacttttatgccccagagctgctgttctttgccaagcggtacaaggcagccttcaccgagtgctgtcaggcagcagataaagcagcatgcctgctgccaaagctggacgagctgagggatgagggcaaggcaagctccgccaagcagcgcctgaagtgtgcaagcctgcagaagttcggagagagggcctttaaggcatgggcagtggcaaggctgtcccagcggttcccaaaggccgagtttgccgaggtgtctaagctggtgaccgacctgacaaaggtgcacaccgagtgctgtcacggcgacctgctggagtgcgcagacgatagagccgatctggccaagtacatctgtgagaaccaggactctatctctagcaagctgaaggagtgctgtgagaagcccctgctggagaagtcccactgcatcgccgaggtggagaacgacgagatgccagcagatctgccaagcctggcagcagacttcgtggagtccaaggacgtgtgcaagaattacgccgaggccaaggacgtgttcctgggcatgtttctgtacgagtatgccaggcgccaccctgactactccgtggtgctgctgctgcggctggccaagacctatgagaccacactggagaagtgctgtgccgccgccgacccccacgagtgctatgcaaaggtgttcgacgagtttaagcccctggtggaggagcctcagaacctgatcaagcagaattgtgagctgtttgagcagctgggcgagtacaagttccagaacgccctgctggtgagatataccaagaaggtgccacaggtgtctacccccacactggtggaggtgagccggaatctgggcaaggtcggctccaagtgctgtaagcaccctgaggccaagagaatgccatgcgccgaggattacctgtccgtggtgctgaaccagctgtgcgtgctgcacgagaagacccccgtgagcgacagggtgaccaagtgctgtacagagtctctggtgaaccggagaccatgctttagcgccctggaggtggatgagacatatgtgcccaaggagttcaatgccgagaccttcacatttcacgccgacatctgtaccctgagcgagaaggagcgccagatcaagaagcagacagccctggtggagctggtgaagcacaagccaaaggccaccaaggagcagctgaaggccgtgatggacgatttcgccgcctttgtggagaagtgctgtaaggccgacgataaggagacatgcttcgcagaggagggcaagaagctggtggcagcaagccaggcagcaggaggctccggcggctctccactgggcctggccggcctgagcggccggagcgacaaccacggcggcagcggcggctccgaggtgcagctggtggagtccggcggcggcctggtgcagcccggcggcagcctgaggctgtcctgcgccgcctctggcttcacctttaacacatacgcaatgaattgggtgcgccaggcaccaggcaagggactggagtgggtggcccggatcagaagcaagtacaacaattatgccacctactatgccgactccgtgaaggatcggtttaccatcagcagagacgattccaagaacacactgtatctgcagatgaatagcctgcgggccgaggatacagccgtgtactattgcgtgagacacggcaactttggcaattcttacgtgagctggttcgcctattggggccagggcaccatggtgacagtgtcctctgcctctaccaagggacctagcgtgttcccactggcacctagctccaagtctaccagcggaggcacagccgccctgggatgtctggtgaaggactactttccagagcccgtgacagtgtcctggaactctggcgccctgaccagcggagtgcacacattccctgccgtgctgcagtctagcggcctgtactccctgtcctctgtggtgaccgtgccaagctcctctctgggcacccagacatatatctgcaacgtgaatcacaagccctctaatacaaaggtggacaagagggtggagcctaagagctgccccccttgtggcggaggcggtagcgacatccagatgacacagtctccctcttccctgtctgcttccgtgggcgatagagtgacaatcacctgtcgcgccagcgagaacatctactcttatctggcttggtaccagcagaagcccggcaaggcccctaagctgctgatctataatgccaagacactggctgagggcgtgccttccaggttcagcggatctggatccggaaccgactttacactgaccatcagctctctgcagccagaggattttgccacatactattgccagcatcattacggaacaccaagaacattcggcgggggaacaaaagtggaaatcaagggcggaggcgggtctggaggtggagggagtggaggaggggggagcggtgggggaggtagccaggtccagctggtgcagtcaggagccgaggtgaagaagccaggggcatcagtcaaggtgtcatgtaaagcatcaggttatacttttacctcctactggatgaactgggtgaggcaggctccaggacagggcctggagtggatgggaaggatcgacccctacgatagcgagacacactatgctcagaagctgcagggcagagtgaccatgaccacagacacctccacaagcaccgcctatatggagctgaggagcctgcggtctgacgataccgccgtgtactattgcgctcgcggcggctacgacttcgatgtgggcacactgtattggttctttgacgtgtggggccagggcaccacagtgaccgtgtccagcggtggtagcggcggcagtcctctgggactggcgggcctttctggcagaagcgacaatcacggtggaggaggtagtggtggtggcggatctggaggaggtggcagtggcggtggaggttcaggaggtggaggctctggcggaggtggtagtggcggttccggaggttccgcattcaagcatgaaatcaaggatagtgacaatgctgagctaaacagcgccgtgctgcaagtgaacagactgaagagcgctcagtccggctaa

SEQ ID NO: 323 - DNA, 3576 bp, Artificial Sequence
  source: /note="Description of Artificial Sequence: Synthetic CD3cap137-ALB-MC2-h1F3.5Fd- NKG2A(L-H)-MC2-32GS-Acap9 sequence"
caggacggcaacgaggagatgggcggcatcacccagacaccatacaaggtgagcatctccggcaccacagtgatcctgaccggaggaggcagcggaggaggctccggaggcggctctgaggtggcccacaggttcaaggatctgggcgaggagaacttcaaggccctggtgctgatcgccttcgcccagtatctgcagcagtgcccctttgaggaccacgtgaagctggtgaacgaggtgaccgagttcgccaagacatgcgtggccgacgagtccgccgagaattgtgataagtctctgcacaccctgtttggcgataagctgtgcaccgtggccacactgagggagacatacggcgagatggccgactgctgtgccaagcaggagcccgagcgcaacgagtgcttcctgcagcacaaggacgataaccctaatctgccacggctggtgagacctgaggtggacgtgatgtgcaccgccttccacgataatgaggagacatttctgaagaagtacctgtatgagatcgcccggagacacccttacttttatgccccagagctgctgttctttgccaagcggtacaaggcagccttcaccgagtgctgtcaggcagcagataaagcagcatgcctgctgccaaagctggacgagctgagggatgagggcaaggcaagctccgccaagcagcgcctgaagtgtgcaagcctgcagaagttcggagagagggcctttaaggcatgggcagtggcaaggctgtcccagcggttcccaaaggccgagtttgccgaggtgtctaagctggtgaccgacctgacaaaggtgcacaccgagtgctgtcacggcgacctgctggagtgcgcagacgatagagccgatctggccaagtacatctgtgagaaccaggactctatctctagcaagctgaaggagtgctgtgagaagcccctgctggagaagtcccactgcatcgccgaggtggagaacgacgagatgccagcagatctgccaagcctggcagcagacttcgtggagtccaaggacgtgtgcaagaattacgccgaggccaaggacgtgttcctgggcatgtttctgtacgagtatgccaggcgccaccctgactactccgtggtgctgctgctgcggctggccaagacctatgagaccacactggagaagtgctgtgccgccgccgacccccacgagtgctatgcaaaggtgttcgacgagtttaagcccctggtggaggagcctcagaacctgatcaagcagaattgtgagctgtttgagcagctgggcgagtacaagttccagaacgccctgctggtgagatataccaagaaggtgccacaggtgtctacccccacactggtggaggtgagccggaatctgggcaaggtcggctccaagtgctgtaagcaccctgaggccaagagaatgccatgcgccgaggattacctgtccgtggtgctgaaccagctgtgcgtgctgcacgagaagacccccgtgagcgacagggtgaccaagtgctgtacagagtctctggtgaaccggagaccatgctttagcgccctggaggtggatgagacatatgtgcccaaggagttcaatgccgagaccttcacatttcacgccgacatctgtaccctgagcgagaaggagcgccagatcaagaagcagacagccctggtggagctggtgaagcacaagccaaaggccaccaaggagcagctgaaggccgtgatggacgatttcgccgcctttgtggagaagtgctgtaaggccgacgataaggagacatgcttcgcagaggagggcaagaagctggtggcagcaagccaggcagcaggaggctccggcggctctccactgggcctggccggcctgagcggccggagcgacaaccacggcggcagcggcggctccgaggtgcagctggtggagtccggcggcggcctggtgcagcccggcggcagcctgaggctgtcctgcgccgcctctggcttcacctttaacacatacgcaatgaattgggtgcgccaggcaccaggcaagggactggagtgggtggcccggatcagaagcaagtacaacaattatgccacctactatgccgactccgtgaaggatcggtttaccatcagcagagacgattccaagaacacactgtatctgcagatgaatagcctgcgggccgaggatacagccgtgtactattgcgtgagacacggcaactttggcaattcttacgtgagctggttcgcctattggggccagggcaccatggtgacagtgtcctctgcctctaccaagggacctagcgtgttcccactggcacctagctccaagtctaccagcggaggcacagccgccctgggatgtctggtgaaggactactttccagagcccgtgacagtgtcctggaactctggcgccctgaccagcggagtgcacacattccctgccgtgctgcagtctagcggcctgtactccctgtcctctgtggtgaccgtgccaagctcctctctgggcacccagacatatatctgcaacgtgaatcacaagccctctaatacaaaggtggacaagagggtggagcctaagagctgccccccttgtggcggaggcggtagcgacatccagatgacacagtctccctcttccctgtctgcttccgtgggcgatagagtgacaatcacctgtcgcgccagcgagaacatctactcttatctggcttggtaccagcagaagcccggcaaggcccctaagctgctgatctataatgccaagacactggctgagggcgtgccttccaggttcagcggatctggatccggaaccgactttacactgaccatcagctctctgcagccagaggattttgccacatactattgccagcatcattacggaacaccaagaacattcggcgggggaacaaaagtggaaatcaagggcggaggcgggtctggaggtggagggagtggaggaggggggagcggtgggggaggtagccaggtccagctggtgcagtcaggagccgaggtgaagaagccaggggcatcagtcaaggtgtcatgtaaagcatcaggttatacttttacctcctactggatgaactgggtgaggcaggctccaggacagggcctggagtggatgggaaggatcgacccctacgatagcgagacacactatgctcagaagctgcagggcagagtgaccatgaccacagacacctccacaagcaccgcctatatggagctgaggagcctgcggtctgacgataccgccgtgtactattgcgctcgcggcggctacgacttcgatgtgggcacactgtattggttctttgacgtgtggggccagggcaccacagtgaccgtgtccagcggtggtagcggcggcagtcctctgggactggcgggcctttctggcagaagcgacaatcacggtggaggaggtagtggtggtggcggatctggaggaggtggcagtggcggtggaggttcaggcggttccggaggttccgctagacattgtggacatagtccagaagagtggataacttattcgtaa

SEQ ID NO: 324 - DNA, 3657 bp, Artificial Sequence
  source: /note="Description of Artificial Sequence: Synthetic CD3cap137-ALB-NC-h1F3.5Fd- NKG2A(L-H)-NC-32GS-Acap3.1 sequence"
caggacggcaacgaggagatgggcggcatcacccagacaccatacaaggtgagcatctccggcaccacagtgatcctgaccggaggaggcagcggaggaggctccggaggcggctctgaggtggcccacaggttcaaggatctgggcgaggagaacttcaaggccctggtgctgatcgccttcgcccagtatctgcagcagtgcccctttgaggaccacgtgaagctggtgaacgaggtgaccgagttcgccaagacatgcgtggccgacgagtccgccgagaattgtgataagtctctgcacaccctgtttggcgataagctgtgcaccgtggccacactgagggagacatacggcgagatggccgactgctgtgccaagcaggagcccgagcgcaacgagtgcttcctgcagcacaaggacgataaccctaatctgccacggctggtgagacctgaggtggacgtgatgtgcaccgccttccacgataatgaggagacatttctgaagaagtacctgtatgagatcgcccggagacacccttacttttatgccccagagctgctgttctttgccaagcggtacaaggcagccttcaccgagtgctgtcaggcagcagataaagcagcatgcctgctgccaaagctggacgagctgagggatgagggcaaggcaagctccgccaagcagcgcctgaagtgtgcaagcctgcagaagttcggagagagggcctttaaggcatgggcagtggcaaggctgtcccagcggttcccaaaggccgagtttgccgaggtgtctaagctggtgaccgacctgacaaaggtgcacaccgagtgctgtcacggcgacctgctggagtgcgcagacgatagagccgatctggccaagtacatctgtgagaaccaggactctatctctagcaagctgaaggagtgctgtgagaagcccctgctggagaagtcccactgcatcgccgaggtggagaacgacgagatgccagcagatctgccaagcctggcagcagacttcgtggagtccaaggacgtgtgcaagaattacgccgaggccaaggacgtgttcctgggcatgtttctgtacgagtatgccaggcgccaccctgactactccgtggtgctgctgctgcggctggccaagacctatgagaccacactggagaagtgctgtgccgccgccgacccccacgagtgctatgcaaaggtgttcgacgagtttaagcccctggtggaggagcctcagaacctgatcaagcagaattgtgagctgtttgagcagctgggcgagtacaagttccagaacgccctgctggtgagatataccaagaaggtgccacaggtgtctacccccacactggtggaggtgagccggaatctgggcaaggtcggctccaagtgctgtaagcaccctgaggccaagagaatgccatgcgccgaggattacctgtccgtggtgctgaaccagctgtgcgtgctgcacgagaagacccccgtgagcgacagggtgaccaagtgctgtacagagtctctggtgaaccggagaccatgctttagcgccctggaggtggatgagacatatgtgcccaaggagttcaatgccgagaccttcacatttcacgccgacatctgtaccctgagcgagaaggagcgccagatcaagaagcagacagccctggtggagctggtgaagcacaagccaaaggccaccaaggagcagctgaaggccgtgatggacgatttcgccgcctttgtggagaagtgctgtaaggccgacgataaggagacatgcttcgcagaggagggcaagaagctggtggcagcaagccaggcagcaggaggctccggcggctctggtggcagtggagggagcggtggatctggcgggtcaggcgggtccggcggcagcggcggctccgaggtgcagctggtggagtccggcggcggcctggtgcagcccggcggcagcctgaggctgtcctgcgccgcctctggcttcacctttaacacatacgcaatgaattgggtgcgccaggcaccaggcaagggactggagtgggtggcccggatcagaagcaagtacaacaattatgccacctactatgccgactccgtgaaggatcggtttaccatcagcagagacgattccaagaacacactgtatctgcagatgaatagcctgcgggccgaggatacagccgtgtactattgcgtgagacacggcaactttggcaattcttacgtgagctggttcgcctattggggccagggcaccatggtgacagtgtcctctgcctctaccaagggacctagcgtgttcccactggcacctagctccaagtctaccagcggaggcacagccgccctgggatgtctggtgaaggactactttccagagcccgtgacagtgtcctggaactctggcgccctgaccagcggagtgcacacattccctgccgtgctgcagtctagcggcctgtactccctgtcctctgtggtgaccgtgccaagctcctctctgggcacccagacatatatctgcaacgtgaatcacaagccctctaatacaaaggtggacaagagggtggagcctaagagctgccccccttgtggcggaggcggtagcgacatccagatgacacagtctccctcttccctgtctgcttccgtgggcgatagagtgacaatcacctgtcgcgccagcgagaacatctactcttatctggcttggtaccagcagaagcccggcaaggcccctaagctgctgatctataatgccaagacactggctgagggcgtgccttccaggttcagcggatctggatccggaaccgactttacactgaccatcagctctctgcagccagaggattttgccacatactattgccagcatcattacggaacaccaagaacattcggcgggggaacaaaagtggaaatcaagggcggaggcgggtctggaggtggagggagtggaggaggggggagcggtgggggaggtagccaggtccagctggtgcagtcaggagccgaggtgaagaagccaggggcatcagtcaaggtgtcatgtaaagcatcaggttatacttttacctcctactggatgaactgggtgaggcaggctccaggacagggcctggagtggatgggaaggatcgacccctacgatagcgagacacactatgctcagaagctgcagggcagagtgaccatgaccacagacacctccacaagcaccgcctatatggagctgaggagcctgcggtctgacgataccgccgtgtactattgcgctcgcggcggctacgacttcgatgtgggcacactgtattggttctttgacgtgtggggccagggcaccacagtgaccgtgtccagcggtggtagcggcggcagtggtggcagtggagggagcggtggatctggcgggtcaggcgggtccggtggaggaggtagtggtggtggcggatctggaggaggtggcagtggcggtggaggttcaggcggttccggaggttccctgagcatcgacaacgaggaggagatgaagttcctgagcatcatcagccctagcagctggatcggcgtgttcaactccgccgtgctgcaagtgaacagactgaagagcgctcagtccggctaa

SEQ ID NO: 325 - DNA, 3687 bp, Artificial Sequence
  source: /note="Description of Artificial Sequence: Synthetic CD3cap137-ALB-NC-h1F3.5Fd- NKG2A(L-H)-NC-42GS-Acap3.1 sequence"
caggacggcaacgaggagatgggcggcatcacccagacaccatacaaggtgagcatctccggcaccacagtgatcctgaccggaggaggcagcggaggaggctccggaggcggctctgaggtggcccacaggttcaaggatctgggcgaggagaacttcaaggccctggtgctgatcgccttcgcccagtatctgcagcagtgcccctttgaggaccacgtgaagctggtgaacgaggtgaccgagttcgccaagacatgcgtggccgacgagtccgccgagaattgtgataagtctctgcacaccctgtttggcgataagctgtgcaccgtggccacactgagggagacatacggcgagatggccgactgctgtgccaagcaggagcccgagcgcaacgagtgcttcctgcagcacaaggacgataaccctaatctgccacggctggtgagacctgaggtggacgtgatgtgcaccgccttccacgataatgaggagacatttctgaagaagtacctgtatgagatcgcccggagacacccttacttttatgccccagagctgctgttctttgccaagcggtacaaggcagccttcaccgagtgctgtcaggcagcagataaagcagcatgcctgctgccaaagctggacgagctgagggatgagggcaaggcaagctccgccaagcagcgcctgaagtgtgcaagcctgcagaagttcggagagagggcctttaaggcatgggcagtggcaaggctgtcccagcggttcccaaaggccgagtttgccgaggtgtctaagctggtgaccgacctgacaaaggtgcacaccgagtgctgtcacggcgacctgctggagtgcgcagacgatagagccgatctggccaagtacatctgtgagaaccaggactctatctctagcaagctgaaggagtgctgtgagaagcccctgctggagaagtcccactgcatcgccgaggtggagaacgacgagatgccagcagatctgccaagcctggcagcagacttcgtggagtccaaggacgtgtgcaagaattacgccgaggccaaggacgtgttcctgggcatgtttctgtacgagtatgccaggcgccaccctgactactccgtggtgctgctgctgcggctggccaagacctatgagaccacactggagaagtgctgtgccgccgccgacccccacgagtgctatgcaaaggtgttcgacgagtttaagcccctggtggaggagcctcagaacctgatcaagcagaattgtgagctgtttgagcagctgggcgagtacaagttccagaacgccctgctggtgagatataccaagaaggtgccacaggtgtctacccccacactggtggaggtgagccggaatctgggcaaggtcggctccaagtgctgtaagcaccctgaggccaagagaatgccatgcgccgaggattacctgtccgtggtgctgaaccagctgtgcgtgctgcacgagaagacccccgtgagcgacagggtgaccaagtgctgtacagagtctctggtgaaccggagaccatgctttagcgccctggaggtggatgagacatatgtgcccaaggagttcaatgccgagaccttcacatttcacgccgacatctgtaccctgagcgagaaggagcgccagatcaagaagcagacagccctggtggagctggtgaagcacaagccaaaggccaccaaggagcagctgaaggccgtgatggacgatttcgccgcctttgtggagaagtgctgtaaggccgacgataaggagacatgcttcgcagaggagggcaagaagctggtggcagcaagccaggcagcaggaggctccggcggctctggtggcagtggagggagcggtggatctggcgggtcaggcgggtccggcggcagcggcggctccgaggtgcagctggtggagtccggcggcggcctggtgcagcccggcggcagcctgaggctgtcctgcgccgcctctggcttcacctttaacacatacgcaatgaattgggtgcgccaggcaccaggcaagggactggagtgggtggcccggatcagaagcaagtacaacaattatgccacctactatgccgactccgtgaaggatcggtttaccatcagcagagacgattccaagaacacactgtatctgcagatgaatagcctgcgggccgaggatacagccgtgtactattgcgtgagacacggcaactttggcaattcttacgtgagctggttcgcctattggggccagggcaccatggtgacagtgtcctctgcctctaccaagggacctagcgtgttcccactggcacctagctccaagtctaccagcggaggcacagccgccctgggatgtctggtgaaggactactttccagagcccgtgacagtgtcctggaactctggcgccctgaccagcggagtgcacacattccctgccgtgctgcagtctagcggcctgtactccctgtcctctgtggtgaccgtgccaagctcctctctgggcacccagacatatatctgcaacgtgaatcacaagccctctaatacaaaggtggacaagagggtggagcctaagagctgccccccttgtggcggaggcggtagcgacatccagatgacacagtctccctcttccctgtctgcttccgtgggcgatagagtgacaatcacctgtcgcgccagcgagaacatctactcttatctggcttggtaccagcagaagcccggcaaggcccctaagctgctgatctataatgccaagacactggctgagggcgtgccttccaggttcagcggatctggatccggaaccgactttacactgaccatcagctctctgcagccagaggattttgccacatactattgccagcatcattacggaacaccaagaacattcggcgggggaacaaaagtggaaatcaagggcggaggcgggtctggaggtggagggagtggaggaggggggagcggtgggggaggtagccaggtccagctggtgcagtcaggagccgaggtgaagaagccaggggcatcagtcaaggtgtcatgtaaagcatcaggttatacttttacctcctactggatgaactgggtgaggcaggctccaggacagggcctggagtggatgggaaggatcgacccctacgatagcgagacacactatgctcagaagctgcagggcagagtgaccatgaccacagacacctccacaagcaccgcctatatggagctgaggagcctgcggtctgacgataccgccgtgtactattgcgctcgcggcggctacgacttcgatgtgggcacactgtattggttctttgacgtgtggggccagggcaccacagtgaccgtgtccagcggtggtagcggcggcagtggtggcagtggagggagcggtggatctggcgggtcaggcgggtccggtggaggaggtagtggtggtggcggatctggaggaggtggcagtggcggtggaggttcaggaggtggaggctctggcggaggtggtagtggcggttccggaggttccctgagcatcgacaacgaggaggagatgaagttcctgagcatcatcagccctagcagctggatcggcgtgttcaactccgccgtgctgcaagtgaacagactgaagagcgctcagtccggctaa

SEQ ID NO: 326 - DNA, 3627 bp, Artificial Sequence
  source: /note="Description of Artificial Sequence: Synthetic CD3cap137-ALB-NC-h1F3.5Fd- NKG2A(L-H)-NC-32GS-Acap4.1 sequence"
caggacggcaacgaggagatgggcggcatcacccagacaccatacaaggtgagcatctccggcaccacagtgatcctgaccggaggaggcagcggaggaggctccggaggcggctctgaggtggcccacaggttcaaggatctgggcgaggagaacttcaaggccctggtgctgatcgccttcgcccagtatctgcagcagtgcccctttgaggaccacgtgaagctggtgaacgaggtgaccgagttcgccaagacatgcgtggccgacgagtccgccgagaattgtgataagtctctgcacaccctgtttggcgataagctgtgcaccgtggccacactgagggagacatacggcgagatggccgactgctgtgccaagcaggagcccgagcgcaacgagtgcttcctgcagcacaaggacgataaccctaatctgccacggctggtgagacctgaggtggacgtgatgtgcaccgccttccacgataatgaggagacatttctgaagaagtacctgtatgagatcgcccggagacacccttacttttatgccccagagctgctgttctttgccaagcggtacaaggcagccttcaccgagtgctgtcaggcagcagataaagcagcatgcctgctgccaaagctggacgagctgagggatgagggcaaggcaagctccgccaagcagcgcctgaagtgtgcaagcctgcagaagttcggagagagggcctttaaggcatgggcagtggcaaggctgtcccagcggttcccaaaggccgagtttgccgaggtgtctaagctggtgaccgacctgacaaaggtgcacaccgagtgctgtcacggcgacctgctggagtgcgcagacgatagagccgatctggccaagtacatctgtgagaaccaggactctatctctagcaagctgaaggagtgctgtgagaagcccctgctggagaagtcccactgcatcgccgaggtggagaacgacgagatgccagcagatctgccaagcctggcagcagacttcgtggagtccaaggacgtgtgcaagaattacgccgaggccaaggacgtgttcctgggcatgtttctgtacgagtatgccaggcgccaccctgactactccgtggtgctgctgctgcggctggccaagacctatgagaccacactggagaagtgctgtgccgccgccgacccccacgagtgctatgcaaaggtgttcgacgagtttaagcccctggtggaggagcctcagaacctgatcaagcagaattgtgagctgtttgagcagctgggcgagtacaagttccagaacgccctgctggtgagatataccaagaaggtgccacaggtgtctacccccacactggtggaggtgagccggaatctgggcaaggtcggctccaagtgctgtaagcaccctgaggccaagagaatgccatgcgccgaggattacctgtccgtggtgctgaaccagctgtgcgtgctgcacgagaagacccccgtgagcgacagggtgaccaagtgctgtacagagtctctggtgaaccggagaccatgctttagcgccctggaggtggatgagacatatgtgcccaaggagttcaatgccgagaccttcacatttcacgccgacatctgtaccctgagcgagaaggagcgccagatcaagaagcagacagccctggtggagctggtgaagcacaagccaaaggccaccaaggagcagctgaaggccgtgatggacgatttcgccgcctttgtggagaagtgctgtaaggccgacgataaggagacatgcttcgcagaggagggcaagaagctggtggcagcaagccaggcagcaggaggctccggcggctctggtggcagtggagggagcggtggatctggcgggtcaggcgggtccggcggcagcggcggctccgaggtgcagctggtggagtccggcggcggcctggtgcagcccggcggcagcctgaggctgtcctgcgccgcctctggcttcacctttaacacatacgcaatgaattgggtgcgccaggcaccaggcaagggactggagtgggtggcccggatcagaagcaagtacaacaattatgccacctactatgccgactccgtgaaggatcggtttaccatcagcagagacgattccaagaacacactgtatctgcagatgaatagcctgcgggccgaggatacagccgtgtactattgcgtgagacacggcaactttggcaattcttacgtgagctggttcgcctattggggccagggcaccatggtgacagtgtcctctgcctctaccaagggacctagcgtgttcccactggcacctagctccaagtctaccagcggaggcacagccgccctgggatgtctggtgaaggactactttccagagcccgtgacagtgtcctggaactctggcgccctgaccagcggagtgcacacattccctgccgtgctgcagtctagcggcctgtactccctgtcctctgtggtgaccgtgccaagctcctctctgggcacccagacatatatctgcaacgtgaatcacaagccctctaatacaaaggtggacaagagggtggagcctaagagctgccccccttgtggcggaggcggtagcgacatccagatgacacagtctccctcttccctgtctgcttccgtgggcgatagagtgacaatcacctgtcgcgccagcgagaacatctactcttatctggcttggtaccagcagaagcccggcaaggcccctaagctgctgatctataatgccaagacactggctgagggcgtgccttccaggttcagcggatctggatccggaaccgactttacactgaccatcagctctctgcagccagaggattttgccacatactattgccagcatcattacggaacaccaagaacattcggcgggggaacaaaagtggaaatcaagggcggaggcgggtctggaggtggagggagtggaggaggggggagcggtgggggaggtagccaggtccagctggtgcagtcaggagccgaggtgaagaagccaggggcatcagtcaaggtgtcatgtaaagcatcaggttatacttttacctcctactggatgaactgggtgaggcaggctccaggacagggcctggagtggatgggaaggatcgacccctacgatagcgagacacactatgctcagaagctgcagggcagagtgaccatgaccacagacacctccacaagcaccgcctatatggagctgaggagcctgcggtctgacgataccgccgtgtactattgcgctcgcggcggctacgacttcgatgtgggcacactgtattggttctttgacgtgtggggccagggcaccacagtgaccgtgtccagcggtggtagcggcggcagtggtggcagtggagggagcggtggatctggcgggtcaggcgggtccggtggaggaggtagtggtggtggcggatctggaggaggtggcagtggcggtggaggttcaggcggttccggaggttccgcattcaagcatgaaatcaaggatagtgacaatgctgagctaaacagcgccgtgctgcaagtgaacagactgaagagcgctcagtccggctaa

SEQ ID NO: 327 - DNA, 3657 bp, Artificial Sequence
  source: /note="Description of Artificial Sequence: Synthetic CD3cap137-ALB-NC-h1F3.5Fd- NKG2A(L-H)-NC-42GS-Acap4.1 sequence"
caggacggcaacgaggagatgggcggcatcacccagacaccatacaaggtgagcatctccggcaccacagtgatcctgaccggaggaggcagcggaggaggctccggaggcggctctgaggtggcccacaggttcaaggatctgggcgaggagaacttcaaggccctggtgctgatcgccttcgcccagtatctgcagcagtgcccctttgaggaccacgtgaagctggtgaacgaggtgaccgagttcgccaagacatgcgtggccgacgagtccgccgagaattgtgataagtctctgcacaccctgtttggcgataagctgtgcaccgtggccacactgagggagacatacggcgagatggccgactgctgtgccaagcaggagcccgagcgcaacgagtgcttcctgcagcacaaggacgataaccctaatctgccacggctggtgagacctgaggtggacgtgatgtgcaccgccttccacgataatgaggagacatttctgaagaagtacctgtatgagatcgcccggagacacccttacttttatgccccagagctgctgttctttgccaagcggtacaaggcagccttcaccgagtgctgtcaggcagcagataaagcagcatgcctgctgccaaagctggacgagctgagggatgagggcaaggcaagctccgccaagcagcgcctgaagtgtgcaagcctgcagaagttcggagagagggcctttaaggcatgggcagtggcaaggctgtcccagcggttcccaaaggccgagtttgccgaggtgtctaagctggtgaccgacctgacaaaggtgcacaccgagtgctgtcacggcgacctgctggagtgcgcagacgatagagccgatctggccaagtacatctgtgagaaccaggactctatctctagcaagctgaaggagtgctgtgagaagcccctgctggagaagtcccactgcatcgccgaggtggagaacgacgagatgccagcagatctgccaagcctggcagcagacttcgtggagtccaaggacgtgtgcaagaattacgccgaggccaaggacgtgttcctgggcatgtttctgtacgagtatgccaggcgccaccctgactactccgtggtgctgctgctgcggctggccaagacctatgagaccacactggagaagtgctgtgccgccgccgacccccacgagtgctatgcaaaggtgttcgacgagtttaagcccctggtggaggagcctcagaacctgatcaagcagaattgtgagctgtttgagcagctgggcgagtacaagttccagaacgccctgctggtgagatataccaagaaggtgccacaggtgtctacccccacactggtggaggtgagccggaatctgggcaaggtcggctccaagtgctgtaagcaccctgaggccaagagaatgccatgcgccgaggattacctgtccgtggtgctgaaccagctgtgcgtgctgcacgagaagacccccgtgagcgacagggtgaccaagtgctgtacagagtctctggtgaaccggagaccatgctttagcgccctggaggtggatgagacatatgtgcccaaggagttcaatgccgagaccttcacatttcacgccgacatctgtaccctgagcgagaaggagcgccagatcaagaagcagacagccctggtggagctggtgaagcacaagccaaaggccaccaaggagcagctgaaggccgtgatggacgatttcgccgcctttgtggagaagtgctgtaaggccgacgataaggagacatgcttcgcagaggagggcaagaagctggtggcagcaagccaggcagcaggaggctccggcggctctggtggcagtggagggagcggtggatctggcgggtcaggcgggtccggcggcagcggcggctccgaggtgcagctggtggagtccggcggcggcctggtgcagcccggcggcagcctgaggctgtcctgcgccgcctctggcttcacctttaacacatacgcaatgaattgggtgcgccaggcaccaggcaagggactggagtgggtggcccggatcagaagcaagtacaacaattatgccacctactatgccgactccgtgaaggatcggtttaccatcagcagagacgattccaagaacacactgtatctgcagatgaatagcctgcgggccgaggatacagccgtgtactattgcgtgagacacggcaactttggcaattcttacgtgagctggttcgcctattggggccagggcaccatggtgacagtgtcctctgcctctaccaagggacctagcgtgttcccactggcacctagctccaagtctaccagcggaggcacagccgccctgggatgtctggtgaaggactactttccagagcccgtgacagtgtcctggaactctggcgccctgaccagcggagtgcacacattccctgccgtgctgcagtctagcggcctgtactccctgtcctctgtggtgaccgtgccaagctcctctctgggcacccagacatatatctgcaacgtgaatcacaagccctctaatacaaaggtggacaagagggtggagcctaagagctgccccccttgtggcggaggcggtagcgacatccagatgacacagtctccctcttccctgtctgcttccgtgggcgatagagtgacaatcacctgtcgcgccagcgagaacatctactcttatctggcttggtaccagcagaagcccggcaaggcccctaagctgctgatctataatgccaagacactggctgagggcgtgccttccaggttcagcggatctggatccggaaccgactttacactgaccatcagctctctgcagccagaggattttgccacatactattgccagcatcattacggaacaccaagaacattcggcgggggaacaaaagtggaaatcaagggcggaggcgggtctggaggtggagggagtggaggaggggggagcggtgggggaggtagccaggtccagctggtgcagtcaggagccgaggtgaagaagccaggggcatcagtcaaggtgtcatgtaaagcatcaggttatacttttacctcctactggatgaactgggtgaggcaggctccaggacagggcctggagtggatgggaaggatcgacccctacgatagcgagacacactatgctcagaagctgcagggcagagtgaccatgaccacagacacctccacaagcaccgcctatatggagctgaggagcctgcggtctgacgataccgccgtgtactattgcgctcgcggcggctacgacttcgatgtgggcacactgtattggttctttgacgtgtggggccagggcaccacagtgaccgtgtccagcggtggtagcggcggcagtggtggcagtggagggagcggtggatctggcgggtcaggcgggtccggtggaggaggtagtggtggtggcggatctggaggaggtggcagtggcggtggaggttcaggaggtggaggctctggcggaggtggtagtggcggttccggaggttccgcattcaagcatgaaatcaaggatagtgacaatgctgagctaaacagcgccgtgctgcaagtgaacagactgaagagcgctcagtccggctaa

SEQ ID NO: 328 - DNA, 3582 bp, Artificial Sequence
  source: /note="Description of Artificial Sequence: Synthetic CD3cap137-ALB-NC-h1F3.5Fd- NKG2A(L-H)-NC-32GS-Acap9 sequence"
caggacggcaacgaggagatgggcggcatcacccagacaccatacaaggtgagcatctccggcaccacagtgatcctgaccggaggaggcagcggaggaggctccggaggcggctctgaggtggcccacaggttcaaggatctgggcgaggagaacttcaaggccctggtgctgatcgccttcgcccagtatctgcagcagtgcccctttgaggaccacgtgaagctggtgaacgaggtgaccgagttcgccaagacatgcgtggccgacgagtccgccgagaattgtgataagtctctgcacaccctgtttggcgataagctgtgcaccgtggccacactgagggagacatacggcgagatggccgactgctgtgccaagcaggagcccgagcgcaacgagtgcttcctgcagcacaaggacgataaccctaatctgccacggctggtgagacctgaggtggacgtgatgtgcaccgccttccacgataatgaggagacatttctgaagaagtacctgtatgagatcgcccggagacacccttacttttatgccccagagctgctgttctttgccaagcggtacaaggcagccttcaccgagtgctgtcaggcagcagataaagcagcatgcctgctgccaaagctggacgagctgagggatgagggcaaggcaagctccgccaagcagcgcctgaagtgtgcaagcctgcagaagttcggagagagggcctttaaggcatgggcagtggcaaggctgtcccagcggttcccaaaggccgagtttgccgaggtgtctaagctggtgaccgacctgacaaaggtgcacaccgagtgctgtcacggcgacctgctggagtgcgcagacgatagagccgatctggccaagtacatctgtgagaaccaggactctatctctagcaagctgaaggagtgctgtgagaagcccctgctggagaagtcccactgcatcgccgaggtggagaacgacgagatgccagcagatctgccaagcctggcagcagacttcgtggagtccaaggacgtgtgcaagaattacgccgaggccaaggacgtgttcctgggcatgtttctgtacgagtatgccaggcgccaccctgactactccgtggtgctgctgctgcggctggccaagacctatgagaccacactggagaagtgctgtgccgccgccgacccccacgagtgctatgcaaaggtgttcgacgagtttaagcccctggtggaggagcctcagaacctgatcaagcagaattgtgagctgtttgagcagctgggcgagtacaagttccagaacgccctgctggtgagatataccaagaaggtgccacaggtgtctacccccacactggtggaggtgagccggaatctgggcaaggtcggctccaagtgctgtaagcaccctgaggccaagagaatgccatgcgccgaggattacctgtccgtggtgctgaaccagctgtgcgtgctgcacgagaagacccccgtgagcgacagggtgaccaagtgctgtacagagtctctggtgaaccggagaccatgctttagcgccctggaggtggatgagacatatgtgcccaaggagttcaatgccgagaccttcacatttcacgccgacatctgtaccctgagcgagaaggagcgccagatcaagaagcagacagccctggtggagctggtgaagcacaagccaaaggccaccaaggagcagctgaaggccgtgatggacgatttcgccgcctttgtggagaagtgctgtaaggccgacgataaggagacatgcttcgcagaggagggcaagaagctggtggcagcaagccaggcagcaggaggctccggcggctctggtggcagtggagggagcggtggatctggcgggtcaggcgggtccggcggcagcggcggctccgaggtgcagctggtggagtccggcggcggcctggtgcagcccggcggcagcctgaggctgtcctgcgccgcctctggcttcacctttaacacatacgcaatgaattgggtgcgccaggcaccaggcaagggactggagtgggtggcccggatcagaagcaagtacaacaattatgccacctactatgccgactccgtgaaggatcggtttaccatcagcagagacgattccaagaacacactgtatctgcagatgaatagcctgcgggccgaggatacagccgtgtactattgcgtgagacacggcaactttggcaattcttacgtgagctggttcgcctattggggccagggcaccatggtgacagtgtcctctgcctctaccaagggacctagcgtgttcccactggcacctagctccaagtctaccagcggaggcacagccgccctgggatgtctggtgaaggactactttccagagcccgtgacagtgtcctggaactctggcgccctgaccagcggagtgcacacattccctgccgtgctgcagtctagcggcctgtactccctgtcctctgtggtgaccgtgccaagctcctctctgggcacccagacatatatctgcaacgtgaatcacaagccctctaatacaaaggtggacaagagggtggagcctaagagctgccccccttgtggcggaggcggtagcgacatccagatgacacagtctccctcttccctgtctgcttccgtgggcgatagagtgacaatcacctgtcgcgccagcgagaacatctactcttatctggcttggtaccagcagaagcccggcaaggcccctaagctgctgatctataatgccaagacactggctgagggcgtgccttccaggttcagcggatctggatccggaaccgactttacactgaccatcagctctctgcagccagaggattttgccacatactattgccagcatcattacggaacaccaagaacattcggcgggggaacaaaagtggaaatcaagggcggaggcgggtctggaggtggagggagtggaggaggggggagcggtgggggaggtagccaggtccagctggtgcagtcaggagccgaggtgaagaagccaggggcatcagtcaaggtgtcatgtaaagcatcaggttatacttttacctcctactggatgaactgggtgaggcaggctccaggacagggcctggagtggatgggaaggatcgacccctacgatagcgagacacactatgctcagaagctgcagggcagagtgaccatgaccacagacacctccacaagcaccgcctatatggagctgaggagcctgcggtctgacgataccgccgtgtactattgcgctcgcggcggctacgacttcgatgtgggcacactgtattggttctttgacgtgtggggccagggcaccacagtgaccgtgtccagcggtggtagcggcggcagtggtggcagtggagggagcggtggatctggcgggtcaggcgggtccggtggaggaggtagtggtggtggcggatctggaggaggtggcagtggcggtggaggttcaggcggttccggaggttccgctagacattgtggacatagtccagaagagtggataacttattcgtaa

SEQ ID NO: 329 - DNA, 2226 bp, Artificial Sequence
  source: /note="Description of Artificial Sequence: Synthetic h1F3.5Fd- bi-NKG2A sequence"
ggcggcagcggcggctccgaggtgcagctggtggagtccggcggcggcctggtgcagcccggcggcagcctgaggctgtcctgcgccgcctctggcttcacctttaacacatacgcaatgaattgggtgcgccaggcaccaggcaagggactggagtgggtggcccggatcagaagcaagtacaacaattatgccacctactatgccgactccgtgaaggatcggtttaccatcagcagagacgattccaagaacacactgtatctgcagatgaatagcctgcgggccgaggatacagccgtgtactattgcgtgagacacggcaactttggcaattcttacgtgagctggttcgcctattggggccagggcaccatggtgacagtgtcctctgcctctaccaagggacctagcgtgttcccactggcacctagctccaagtctaccagcggaggcacagccgccctgggatgtctggtgaaggactactttccagagcccgtgacagtgtcctggaactctggcgccctgaccagcggagtgcacacattccctgccgtgctgcagtctagcggcctgtactccctgtcctctgtggtgaccgtgccaagctcctctctgggcacccagacatatatctgcaacgtgaatcacaagccctctaatacaaaggtggacaagagggtggagcctaagagctgccccccttgtggcggaggcggtagcgacatccagatgacacagtctccctcttccctgtctgcttccgtgggcgatagagtgacaatcacctgtcgcgccagcgagaacatctactcttatctggcttggtaccagcagaagcccggcaaggcccctaagctgctgatctataatgccaagacactggctgagggcgtgccttccaggttcagcggatctggatccggaaccgactttacactgaccatcagctctctgcagccagaggattttgccacatactattgccagcatcattacggaacaccaagaacattcggcgggggaacaaaagtggaaatcaagggcggaggcgggtctggaggtggagggagtggaggaggggggagccaggtccagctggtgcagtcaggagccgaggtgaagaagccaggggcatcagtcaaggtgtcatgtaaagcatcaggttatacttttacctcctactggatgaactgggtgaggcaggctccaggacagggcctggagtggatgggaaggatcgacccctacgatagcgagacacactatgctcagaagctgcagggcagagtgaccatgaccacagacacctccacaagcaccgcctatatggagctgaggagcctgcggtctgacgataccgccgtgtactattgcgctcgcggcggctacgacttcgatgtgggcacactgtattggttctttgacgtgtggggccagggcaccacagtgaccgtgtccagcggtggtggtggtagtgatatccaaatgactcaatccccttcttctctgtccgcctctgtcggcgacagagtgaccatcacctgtcgggcttctgagaacatctactcctacctggcttggtaccagcagaaaccaggcaaggcccccaagctgctgatctacaacgccaagaccctggccgagggcgtgccctcccgcttctccggctctgggtctggcaccgattttacactgaccatctccagcctgcagcctgaggacttcgccacctactactgccagcaccactacggcacacctagaacctttggcggcggcaccaaggtggaaatcaagggcggaggcggatctggcggaggtggctccggaggcggaggcagccaggtgcagctggtgcagtccggcgctgaggtgaagaagcctggcgcctccgtgaaagtgtcttgcaaggcttctggctacaccttcacaagctattggatgaactgggtccggcaggctcctggacagggcctggaatggatgggccggatcgatccttacgactccgagacccattacgcccagaagctccaaggcagagtgaccatgaccaccgacacaagcacctccaccgcttacatggaactgcggtccctgagatccgacgacaccgccgtgtactattgcgccagaggcggctacgacttcgacgtgggcaccctgtactggttcttcgatgtgtggggccagggcaccacagttaccgtgtcctcttaa

SEQ ID NO: 330 - DNA, 2226 bp, Artificial Sequence
  source: /note="Description of Artificial Sequence: Synthetic h1F3.5FdMut3-bi-NKG2A sequence"
ggcggcagcggcggctccgaggtgcagctggtggagtccggcggcggcctggtgcagcccggcggcagcctgaggctgtcctgcgccgcctctggcttcacctttaacacatacgcaatgaattgggtgcgccaggcaccaggcaagggactggagtgggtggcccggatcggcagcggcggaaacggctatgccacctactatgccgactccgtgaaggatcggtttaccatcagcagagacgattccaagaacacactgtatctgcagatgaatagcctgcgggccgaggatacagccgtgtactattgcgtgagacacggcaactttggcgccagcgctcggagctggttcgcctattggggccagggcaccatggtgacagtgtcctctgcctctaccaagggacctagcgtgttcccactggcacctagctccaagtctaccagcggaggcacagccgccctgggatgtctggtgaaggactactttccagagcccgtgacagtgtcctggaactctggcgccctgaccagcggagtgcacacattccctgccgtgctgcagtctagcggcctgtactccctgtcctctgtggtgaccgtgccaagctcctctctgggcacccagacatatatctgcaacgtgaatcacaagccctctaatacaaaggtggacaagagggtggagcctaagagctgccccccttgtggcggaggcggtagcgacatccagatgacacagtctccctcttccctgtctgcttccgtgggcgatagagtgacaatcacctgtcgcgccagcgagaacatctactcttatctggcttggtaccagcagaagcccggcaaggcccctaagctgctgatctataatgccaagacactggctgagggcgtgccttccaggttcagcggatctggatccggaaccgactttacactgaccatcagctctctgcagccagaggattttgccacatactattgccagcatcattacggaacaccaagaacattcggcgggggaacaaaagtggaaatcaagggcggaggcgggtctggaggtggagggagtggaggaggggggagccaggtccagctggtgcagtcaggagccgaggtgaagaagccaggggcatcagtcaaggtgtcatgtaaagcatcaggttatacttttacctcctactggatgaactgggtgaggcaggctccaggacagggcctggagtggatgggaaggatcgacccctacgatagcgagacacactatgctcagaagctgcagggcagagtgaccatgaccacagacacctccacaagcaccgcctatatggagctgaggagcctgcggtctgacgataccgccgtgtactattgcgctcgcggcggctacgacttcgatgtgggcacactgtattggttctttgacgtgtggggccagggcaccacagtgaccgtgtccagcggtggtggtggtagtgatatccaaatgactcaatccccttcttctctgtccgcctctgtcggcgacagagtgaccatcacctgtcgggcttctgagaacatctactcctacctggcttggtaccagcagaaaccaggcaaggcccccaagctgctgatctacaacgccaagaccctggccgagggcgtgccctcccgcttctccggctctgggtctggcaccgattttacactgaccatctccagcctgcagcctgaggacttcgccacctactactgccagcaccactacggcacacctagaacctttggcggcggcaccaaggtggaaatcaagggcggaggcggatctggcggaggtggctccggaggcggaggcagccaggtgcagctggtgcagtccggcgctgaggtgaagaagcctggcgcctccgtgaaagtgtcttgcaaggcttctggctacaccttcacaagctattggatgaactgggtccggcaggctcctggacagggcctggaatggatgggccggatcgatccttacgactccgagacccattacgcccagaagctccaaggcagagtgaccatgaccaccgacacaagcacctccaccgcttacatggaactgcggtccctgagatccgacgacaccgccgtgtactattgcgccagaggcggctacgacttcgacgtgggcaccctgtactggttcttcgatgtgtggggccagggcaccacagttaccgtgtcctcttaa

SEQ ID NO: 331 - DNA, 4131 bp, Artificial Sequence
  source: /note="Description of Artificial Sequence: Synthetic CD3cap137-ALB-MC2-hF3.5Fd-bi-NKG2A sequence"
caggacggcaacgaggagatgggcggcatcacccagacaccatacaaggtgagcatctccggcaccacagtgatcctgaccggaggaggcagcggaggaggctccggaggcggctctgaggtggcccacaggttcaaggatctgggcgaggagaacttcaaggccctggtgctgatcgccttcgcccagtatctgcagcagtgcccctttgaggaccacgtgaagctggtgaacgaggtgaccgagttcgccaagacatgcgtggccgacgagtccgccgagaattgtgataagtctctgcacaccctgtttggcgataagctgtgcaccgtggccacactgagggagacatacggcgagatggccgactgctgtgccaagcaggagcccgagcgcaacgagtgcttcctgcagcacaaggacgataaccctaatctgccacggctggtgagacctgaggtggacgtgatgtgcaccgccttccacgataatgaggagacatttctgaagaagtacctgtatgagatcgcccggagacacccttacttttatgccccagagctgctgttctttgccaagcggtacaaggcagccttcaccgagtgctgtcaggcagcagataaagcagcatgcctgctgccaaagctggacgagctgagggatgagggcaaggcaagctccgccaagcagcgcctgaagtgtgcaagcctgcagaagttcggagagagggcctttaaggcatgggcagtggcaaggctgtcccagcggttcccaaaggccgagtttgccgaggtgtctaagctggtgaccgacctgacaaaggtgcacaccgagtgctgtcacggcgacctgctggagtgcgcagacgatagagccgatctggccaagtacatctgtgagaaccaggactctatctctagcaagctgaaggagtgctgtgagaagcccctgctggagaagtcccactgcatcgccgaggtggagaacgacgagatgccagcagatctgccaagcctggcagcagacttcgtggagtccaaggacgtgtgcaagaattacgccgaggccaaggacgtgttcctgggcatgtttctgtacgagtatgccaggcgccaccctgactactccgtggtgctgctgctgcggctggccaagacctatgagaccacactggagaagtgctgtgccgccgccgacccccacgagtgctatgcaaaggtgttcgacgagtttaagcccctggtggaggagcctcagaacctgatcaagcagaattgtgagctgtttgagcagctgggcgagtacaagttccagaacgccctgctggtgagatataccaagaaggtgccacaggtgtctacccccacactggtggaggtgagccggaatctgggcaaggtcggctccaagtgctgtaagcaccctgaggccaagagaatgccatgcgccgaggattacctgtccgtggtgctgaaccagctgtgcgtgctgcacgagaagacccccgtgagcgacagggtgaccaagtgctgtacagagtctctggtgaaccggagaccatgctttagcgccctggaggtggatgagacatatgtgcccaaggagttcaatgccgagaccttcacatttcacgccgacatctgtaccctgagcgagaaggagcgccagatcaagaagcagacagccctggtggagctggtgaagcacaagccaaaggccaccaaggagcagctgaaggccgtgatggacgatttcgccgcctttgtggagaagtgctgtaaggccgacgataaggagacatgcttcgcagaggagggcaagaagctggtggcagcaagccaggcagcaggaggctccggcggctctccactgggcctggccggcctgagcggccggagcgacaaccacggcggcagcggcggctccgaggtgcagctggtggagtccggcggcggcctggtgcagcccggcggcagcctgaggctgtcctgcgccgcctctggcttcacctttaacacatacgcaatgaattgggtgcgccaggcaccaggcaagggactggagtgggtggcccggatcagaagcaagtacaacaattatgccacctactatgccgactccgtgaaggatcggtttaccatcagcagagacgattccaagaacacactgtatctgcagatgaatagcctgcgggccgaggatacagccgtgtactattgcgtgagacacggcaactttggcaattcttacgtgagctggttcgcctattggggccagggcaccatggtgacagtgtcctctgcctctaccaagggacctagcgtgttcccactggcacctagctccaagtctaccagcggaggcacagccgccctgggatgtctggtgaaggactactttccagagcccgtgacagtgtcctggaactctggcgccctgaccagcggagtgcacacattccctgccgtgctgcagtctagcggcctgtactccctgtcctctgtggtgaccgtgccaagctcctctctgggcacccagacatatatctgcaacgtgaatcacaagccctctaatacaaaggtggacaagagggtggagcctaagagctgccccccttgtggcggaggcggtagcgacatccagatgacacagtctccctcttccctgtctgcttccgtgggcgatagagtgacaatcacctgtcgcgccagcgagaacatctactcttatctggcttggtaccagcagaagcccggcaaggcccctaagctgctgatctataatgccaagacactggctgagggcgtgccttccaggttcagcggatctggatccggaaccgactttacactgaccatcagctctctgcagccagaggattttgccacatactattgccagcatcattacggaacaccaagaacattcggcgggggaacaaaagtggaaatcaagggcggaggcgggtctggaggtggagggagtggaggaggggggagccaggtccagctggtgcagtcaggagccgaggtgaagaagccaggggcatcagtcaaggtgtcatgtaaagcatcaggttatacttttacctcctactggatgaactgggtgaggcaggctccaggacagggcctggagtggatgggaaggatcgacccctacgatagcgagacacactatgctcagaagctgcagggcagagtgaccatgaccacagacacctccacaagcaccgcctatatggagctgaggagcctgcggtctgacgataccgccgtgtactattgcgctcgcggcggctacgacttcgatgtgggcacactgtattggttctttgacgtgtggggccagggcaccacagtgaccgtgtccagcggtggtggtggtagtgatatccaaatgactcaatccccttcttctctgtccgcctctgtcggcgacagagtgaccatcacctgtcgggcttctgagaacatctactcctacctggcttggtaccagcagaaaccaggcaaggcccccaagctgctgatctacaacgccaagaccctggccgagggcgtgccctcccgcttctccggctctgggtctggcaccgattttacactgaccatctccagcctgcagcctgaggacttcgccacctactactgccagcaccactacggcacacctagaacctttggcggcggcaccaaggtggaaatcaagggcggaggcggatctggcggaggtggctccggaggcggaggcagccaggtgcagctggtgcagtccggcgctgaggtgaagaagcctggcgcctccgtgaaagtgtcttgcaaggcttctggctacaccttcacaagctattggatgaactgggtccggcaggctcctggacagggcctggaatggatgggccggatcgatccttacgactccgagacccattacgcccagaagctccaaggcagagtgaccatgaccaccgacacaagcacctccaccgcttacatggaactgcggtccctgagatccgacgacaccgccgtgtactattgcgccagaggcggctacgacttcgacgtgggcaccctgtactggttcttcgatgtgtggggccagggcaccacagttaccgtgtcctct

SEQ ID NO: 332 - DNA, 4134 bp, Artificial Sequence
  source: /note="Description of Artificial Sequence: Synthetic CD3cap137-ALB-NC-hF3.5Fd-bi-NKG2A sequence"
caggacggcaacgaggagatgggcggcatcacccagacaccatacaaggtgagcatctccggcaccacagtgatcctgaccggaggaggcagcggaggaggctccggaggcggctctgaggtggcccacaggttcaaggatctgggcgaggagaacttcaaggccctggtgctgatcgccttcgcccagtatctgcagcagtgcccctttgaggaccacgtgaagctggtgaacgaggtgaccgagttcgccaagacatgcgtggccgacgagtccgccgagaattgtgataagtctctgcacaccctgtttggcgataagctgtgcaccgtggccacactgagggagacatacggcgagatggccgactgctgtgccaagcaggagcccgagcgcaacgagtgcttcctgcagcacaaggacgataaccctaatctgccacggctggtgagacctgaggtggacgtgatgtgcaccgccttccacgataatgaggagacatttctgaagaagtacctgtatgagatcgcccggagacacccttacttttatgccccagagctgctgttctttgccaagcggtacaaggcagccttcaccgagtgctgtcaggcagcagataaggcagcatgcctgctgccaaagctggacgagctgagggatgagggcaaggcaagctccgccaagcagcgcctgaagtgtgcaagcctgcagaagttcggagagagggcctttaaggcatgggcagtggcaaggctgtcccagcggttcccaaaggccgagtttgccgaggtgtctaagctggtgaccgacctgacaaaggtgcacaccgagtgctgtcacggcgacctgctggagtgcgcagacgatagagccgatctggccaagtacatctgtgagaaccaggactctatctctagcaagctgaaggagtgctgtgagaagcccctgctggagaagtcccactgcatcgccgaggtggagaacgacgagatgccagcagatctgccaagcctggcagcagacttcgtggagtccaaggacgtgtgcaagaattacgccgaggccaaggacgtgttcctgggcatgtttctgtacgagtatgccaggcgccaccctgactactccgtggtgctgctgctgcggctggccaagacctatgagaccacactggagaagtgctgtgccgccgccgacccccacgagtgctatgcaaaggtgttcgacgagtttaagcccctggtggaggagcctcagaacctgatcaagcagaattgtgagctgtttgagcagctgggcgagtacaagttccagaacgccctgctggtgagatataccaagaaggtgccacaggtgtctacccccacactggtggaggtgagccggaatctgggcaaggtcggctccaagtgctgtaagcaccctgaggccaagagaatgccatgcgccgaggattacctgtccgtggtgctgaaccagctgtgcgtgctgcacgagaagacccccgtgagcgacagggtgaccaagtgctgtacagagtctctggtgaaccggagaccatgctttagcgccctggaggtggatgagacatatgtgcccaaggagttcaatgccgagaccttcacatttcacgccgacatctgtaccctgagcgagaaggagcgccagatcaagaagcagacagccctggtggagctggtgaagcacaagccaaaggccaccaaggagcagctgaaggccgtgatggacgatttcgccgcctttgtggagaagtgctgtaaggccgacgataaggagacatgcttcgcagaggagggcaagaagctggtggcagcaagccaggcagcaggaggctccggcggctctggtggcagtggagggagcggtggatctggcgggtcaggcgggtccggcggcagcggcggctccgaggtgcagctggtggagtccggcggcggcctggtgcagcccggcggcagcctgaggctgtcctgcgccgcctctggcttcacctttaacacatacgcaatgaattgggtgcgccaggcaccaggcaagggactggagtgggtggcccggatcagaagcaagtacaacaattatgccacctactatgccgactccgtgaaggatcggtttaccatcagcagagacgattccaagaacacactgtatctgcagatgaatagcctgcgggccgaggatacagccgtgtactattgcgtgagacacggcaactttggcaattcttacgtgagctggttcgcctattggggccagggcaccatggtgacagtgtcctctgcctctaccaagggacctagcgtgttcccactggcacctagctccaagtctaccagcggaggcacagccgccctgggatgtctggtgaaggactactttccagagcccgtgacagtgtcctggaactctggcgccctgaccagcggagtgcacacattccctgccgtgctgcagtctagcggcctgtactccctgtcctctgtggtgaccgtgccaagctcctctctgggcacccagacatatatctgcaacgtgaatcacaagccctctaatacaaaggtggacaagagggtggagcctaagagctgccccccttgtggcggaggcggtagcgacatccagatgacacagtctccctcttccctgtctgcttccgtgggcgatagagtgacaatcacctgtcgcgccagcgagaacatctactcttatctggcttggtaccagcagaagcccggcaaggcccctaagctgctgatctataatgccaagacactggctgagggcgtgccttccaggttcagcggatctggatccggaaccgactttacactgaccatcagctctctgcagccagaggattttgccacatactattgccagcatcattacggaacaccaagaacattcggcgggggaacaaaagtggaaatcaagggcggaggcgggtctggaggtggagggagtggaggaggggggagccaggtccagctggtgcagtcaggagccgaggtgaagaagccaggggcatcagtcaaggtgtcatgtaaagcatcaggttatacttttacctcctactggatgaactgggtgaggcaggctccaggacagggcctggagtggatgggaaggatcgacccctacgatagcgagacacactatgctcagaagctgcagggcagagtgaccatgaccacagacacctccacaagcaccgcctatatggagctgaggagcctgcggtctgacgataccgccgtgtactattgcgctcgcggcggctacgacttcgatgtgggcacactgtattggttctttgacgtgtggggccagggcaccacagtgaccgtgtccagcggtggtggtggtagtgatatccaaatgactcaatccccttcttctctgtccgcctctgtcggcgacagagtgaccatcacctgtcgggcttctgagaacatctactcctacctggcttggtaccagcagaaaccaggcaaggcccccaagctgctgatctacaacgccaagaccctggccgagggcgtgccctcccgcttctccggctctgggtctggcaccgattttacactgaccatctccagcctgcagcctgaggacttcgccacctactactgccagcaccactacggcacacctagaacctttggcggcggcaccaaggtggaaatcaagggcggaggcggatctggcggaggtggctccggaggcggaggcagccaggtgcagctggtgcagtccggcgctgaggtgaagaagcctggcgcctccgtgaaagtgtcttgcaaggcttctggctacaccttcacaagctattggatgaactgggtccggcaggctcctggacagggcctggaatggatgggccggatcgatccttacgactccgagacccattacgcccagaagctccaaggcagagtgaccatgaccaccgacacaagcacctccaccgcttacatggaactgcggtccctgagatccgacgacaccgccgtgtactattgcgccagaggcggctacgacttcgacgtgggcaccctgtactggttcttcgatgtgtggggccagggcaccacagttaccgtgtcctct

SEQ ID NO: 333 - DNA, 3387 bp, Artificial Sequence
  source: /note="Description of Artificial Sequence: Synthetic CD3cap137-ALB-MC2-h1F3.5Fd- 5T4_IM53(L-H) sequence"
caggacggcaacgaggagatgggcggcatcacccagacaccatacaaggtgagcatctccggcaccacagtgatcctgaccggaggaggcagcggaggaggctccggaggcggctctgaggtggcccacaggttcaaggatctgggcgaggagaacttcaaggccctggtgctgatcgccttcgcccagtatctgcagcagtgcccctttgaggaccacgtgaagctggtgaacgaggtgaccgagttcgccaagacatgcgtggccgacgagtccgccgagaattgtgataagtctctgcacaccctgtttggcgataagctgtgcaccgtggccacactgagggagacatacggcgagatggccgactgctgtgccaagcaggagcccgagcgcaacgagtgcttcctgcagcacaaggacgataaccctaatctgccacggctggtgagacctgaggtggacgtgatgtgcaccgccttccacgataatgaggagacatttctgaagaagtacctgtatgagatcgcccggagacacccttacttttatgccccagagctgctgttctttgccaagcggtacaaggcagccttcaccgagtgctgtcaggcagcagataaagcagcatgcctgctgccaaagctggacgagctgagggatgagggcaaggcaagctccgccaagcagcgcctgaagtgtgcaagcctgcagaagttcggagagagggcctttaaggcatgggcagtggcaaggctgtcccagcggttcccaaaggccgagtttgccgaggtgtctaagctggtgaccgacctgacaaaggtgcacaccgagtgctgtcacggcgacctgctggagtgcgcagacgatagagccgatctggccaagtacatctgtgagaaccaggactctatctctagcaagctgaaggagtgctgtgagaagcccctgctggagaagtcccactgcatcgccgaggtggagaacgacgagatgccagcagatctgccaagcctggcagcagacttcgtggagtccaaggacgtgtgcaagaattacgccgaggccaaggacgtgttcctgggcatgtttctgtacgagtatgccaggcgccaccctgactactccgtggtgctgctgctgcggctggccaagacctatgagaccacactggagaagtgctgtgccgccgccgacccccacgagtgctatgcaaaggtgttcgacgagtttaagcccctggtggaggagcctcagaacctgatcaagcagaattgtgagctgtttgagcagctgggcgagtacaagttccagaacgccctgctggtgagatataccaagaaggtgccacaggtgtctacccccacactggtggaggtgagccggaatctgggcaaggtcggctccaagtgctgtaagcaccctgaggccaagagaatgccatgcgccgaggattacctgtccgtggtgctgaaccagctgtgcgtgctgcacgagaagacccccgtgagcgacagggtgaccaagtgctgtacagagtctctggtgaaccggagaccatgctttagcgccctggaggtggatgagacatatgtgcccaaggagttcaatgccgagaccttcacatttcacgccgacatctgtaccctgagcgagaaggagcgccagatcaagaagcagacagccctggtggagctggtgaagcacaagccaaaggccaccaaggagcagctgaaggccgtgatggacgatttcgccgcctttgtggagaagtgctgtaaggccgacgataaggagacatgcttcgcagaggagggcaagaagctggtggcagcaagccaggcagcaggaggctccggcggctctccactgggcctggccggcctgagcggccggagcgacaaccacggcggcagcggcggctccgaggtgcagctggtggagtccggcggcggcctggtgcagcccggcggcagcctgaggctgtcctgcgccgcctctggcttcacctttaacacatacgcaatgaattgggtgcgccaggcaccaggcaagggactggagtgggtggcccggatcagaagcaagtacaacaattatgccacctactatgccgactccgtgaaggatcggtttaccatcagcagagacgattccaagaacacactgtatctgcagatgaatagcctgcgggccgaggatacagccgtgtactattgcgtgagacacggcaactttggcaattcttacgtgagctggttcgcctattggggccagggcaccatggtgacagtgtcctctgcctctaccaagggacctagcgtgttcccactggcacctagctccaagtctaccagcggaggcacagccgccctgggatgtctggtgaaggactactttccagagcccgtgacagtgtcctggaactctggcgccctgaccagcggagtgcacacattccctgccgtgctgcagtctagcggcctgtactccctgtcctctgtggtgaccgtgccaagctcctctctgggcacccagacatatatctgcaacgtgaatcacaagccctctaatacaaaggtggacaagagggtggagcctaagagctgccccccttgtggcggaggcggtagcgaaaacgtgctaactcaaagtccagcaactctgtccctgtctccaggcgagagagccaccctcagctgttctgcctcctcttccgtgaactacatgcactggtatcaacagaagcctggccagagccctcggctgctgatctacgacacctccaagctggcctctggcatccctgctagattctccggctccggaagcggcaccgactacaccctgaccatctccagcctggaacctgaggattttgccgtgtacttctgcttccagggctctggctacccctacaccttcggcggaggcacaaaagtggagatcaagggcggaggtgggagtggcggcggtggtagcggtggcgggggatccggaggaggggggtcacaggtgcaactagtgcaaagtggtgcagaagttaagaagcctggagcctctgtgaaagtgtcttgcaaggcctctggctacaccttcaccgactactacatgaactgggtccggcaggcccctggccggggcctggagtggatgggcgtgttcaacccctacaacggcgacacccggtacacccagaagtttaaggacagagtgaccatgaccatcgataagtccatctccaccgcctacatggaactgtctcggctgagatccgacgataccgctgtgtactattgtgctagactgcgcctgctgtacgacacatccgagtactacgtgatggactactggggccagggcaccaccgtgacagtgtccagctga

SEQ ID NO: 334 - DNA, 3387 bp, Artificial Sequence
  source: /note="Description of Artificial Sequence: Synthetic HC CD3cap137-ALB-NC-hF3.5Fd-5T4_IM53 sequence"
caggacggcaacgaggagatgggcggcatcacccagacaccatacaaggtgagcatctccggcaccacagtgatcctgaccggaggaggcagcggaggaggctccggaggcggctctgaggtggcccacaggttcaaggatctgggcgaggagaacttcaaggccctggtgctgatcgccttcgcccagtatctgcagcagtgcccctttgaggaccacgtgaagctggtgaacgaggtgaccgagttcgccaagacatgcgtggccgacgagtccgccgagaattgtgataagtctctgcacaccctgtttggcgataagctgtgcaccgtggccacactgagggagacatacggcgagatggccgactgctgtgccaagcaggagcccgagcgcaacgagtgcttcctgcagcacaaggacgataaccctaatctgccacggctggtgagacctgaggtggacgtgatgtgcaccgccttccacgataatgaggagacatttctgaagaagtacctgtatgagatcgcccggagacacccttacttttatgccccagagctgctgttctttgccaagcggtacaaggcagccttcaccgagtgctgtcaggcagcagataaagcagcatgcctgctgccaaagctggacgagctgagggatgagggcaaggcaagctccgccaagcagcgcctgaagtgtgcaagcctgcagaagttcggagagagggcctttaaggcatgggcagtggcaaggctgtcccagcggttcccaaaggccgagtttgccgaggtgtctaagctggtgaccgacctgacaaaggtgcacaccgagtgctgtcacggcgacctgctggagtgcgcagacgatagagccgatctggccaagtacatctgtgagaaccaggactctatctctagcaagctgaaggagtgctgtgagaagcccctgctggagaagtcccactgcatcgccgaggtggagaacgacgagatgccagcagatctgccaagcctggcagcagacttcgtggagtccaaggacgtgtgcaagaattacgccgaggccaaggacgtgttcctgggcatgtttctgtacgagtatgccaggcgccaccctgactactccgtggtgctgctgctgcggctggccaagacctatgagaccacactggagaagtgctgtgccgccgccgacccccacgagtgctatgcaaaggtgttcgacgagtttaagcccctggtggaggagcctcagaacctgatcaagcagaattgtgagctgtttgagcagctgggcgagtacaagttccagaacgccctgctggtgagatataccaagaaggtgccacaggtgtctacccccacactggtggaggtgagccggaatctgggcaaggtcggctccaagtgctgtaagcaccctgaggccaagagaatgccatgcgccgaggattacctgtccgtggtgctgaaccagctgtgcgtgctgcacgagaagacccccgtgagcgacagggtgaccaagtgctgtacagagtctctggtgaaccggagaccatgctttagcgccctggaggtggatgagacatatgtgcccaaggagttcaatgccgagaccttcacatttcacgccgacatctgtaccctgagcgagaaggagcgccagatcaagaagcagacagccctggtggagctggtgaagcacaagccaaaggccaccaaggagcagctgaaggccgtgatggacgatttcgccgcctttgtggagaagtgctgtaaggccgacgataaggagacatgcttcgcagaggagggcaagaagctggtggcagcaagccaggcagcaggaggctccggcggctctggaggttcaggtggcagtggaggctcaggtggaagcggtggtagcggcggcagcggcggctccgaggtgcagctggtggagtccggcggcggcctggtgcagcccggcggcagcctgaggctgtcctgcgccgcctctggcttcacctttaacacatacgcaatgaattgggtgcgccaggcaccaggcaagggactggagtgggtggcccggatcagaagcaagtacaacaattatgccacctactatgccgactccgtgaaggatcggtttaccatcagcagagacgattccaagaacacactgtatctgcagatgaatagcctgcgggccgaggatacagccgtgtactattgcgtgagacacggcaactttggcaattcttacgtgagctggttcgcctattggggccagggcaccatggtgacagtgtcctctgcctctaccaagggacctagcgtgttcccactggcacctagctccaagtctaccagcggaggcacagccgccctgggatgtctggtgaaggactactttccagagcccgtgacagtgtcctggaactctggcgccctgaccagcggagtgcacacattccctgccgtgctgcagtctagcggcctgtactccctgtcctctgtggtgaccgtgccaagctcctctctgggcacccagacatatatctgcaacgtgaatcacaagccctctaatacaaaggtggacaagagggtggagcctaagagctgccccccttgtggcggaggcggtagcgaaaacgtgctaactcaaagtccagcaactctgtccctgtctccaggcgagagagccaccctcagctgttctgcctcctcttccgtgaactacatgcactggtatcaacagaagcctggccagagccctcggctgctgatctacgacacctccaagctggcctctggcatccctgctagattctccggctccggaagcggcaccgactacaccctgaccatctccagcctggaacctgaggattttgccgtgtacttctgcttccagggctctggctacccctacaccttcggcggaggcacaaaagtggagatcaagggcggaggtgggagtggcggcggtggtagcggtggcgggggatccggaggaggggggtcacaggtgcaactagtgcaaagtggtgcagaagttaagaagcctggagcctctgtgaaagtgtcttgcaaggcctctggctacaccttcaccgactactacatgaactgggtccggcaggcccctggccggggcctggagtggatgggcgtgttcaacccctacaacggcgacacccggtacacccagaagtttaaggacagagtgaccatgaccatcgataagtccatctccaccgcctacatggaactgtctcggctgagatccgacgataccgctgtgtactattgtgctagactgcgcctgctgtacgacacatccgagtactacgtgatggactactggggccagggcaccaccgtgacagtgtccagc

SEQ ID NO: 335 - DNA, 1449 bp, Artificial Sequence
  source: /note="Description of Artificial Sequence: Synthetic HC h1F3.5Fd-CD16ScFv(L-H) sequence"
ggcggcagcggcggctccgaggtgcagctggtggagtccggcggcggcctggtgcagcccggcggcagcctgaggctgtcctgcgccgcctctggcttcacctttaacacatacgcaatgaattgggtgcgccaggcaccaggcaagggactggagtgggtggcccggatcagaagcaagtacaacaattatgccacctactatgccgactccgtgaaggatcggtttaccatcagcagagacgattccaagaacacactgtatctgcagatgaatagcctgcgggccgaggatacagccgtgtactattgcgtgagacacggcaactttggcaattcttacgtgagctggttcgcctattggggccagggcaccatggtgacagtgtcctctgcctctaccaagggacctagcgtgttcccactggcacctagctccaagtctaccagcggaggcacagccgccctgggatgtctggtgaaggactactttccagagcccgtgacagtgtcctggaactctggcgccctgaccagcggagtgcacacattccctgccgtgctgcagtctagcggcctgtactccctgtcctctgtggtgaccgtgccaagctcctctctgggcacccagacatatatctgcaacgtgaatcacaagccctctaatacaaaggtggacaagagggtggagcctaagagctgccccccttgtggcggaggcggtagctcttacgtgctgacccagcctagcagcgtgtccgtggctccaggccagaccgctacaatcagctgcggcggacacaacatcggctctaagaacgtgcactggtaccaacagcggcctggccagtcccctgtgctcgttatctaccaggacaacaagcggcccagcggcattcctgagagattcagcggcagcaatagcggcaacaccgccaccctgacaatctctggcacacaggccatggacgaggccgattactattgccaggtgtgggataattacagcgtcctgttcggcggcggcaccaagctgacagtgctgggaggcggcggttccggcggcggaggcagcggcggcggaggctctcaggtccagctggtgcagagcggcgctgaggtgaagaagcccggagaaagcctgaaggtgagctgtaaagccagcggctacacctttacatcttattacatgcactgggtgcggcaggcccctggacaaggcctggaatggatgggcatcatcaaccccagcggcggaagcaccagctacgcccagaaattccagggcagagtgacaatgaccagagataccagcacaagcaccgtgtacatggaactgagctccctgagaagcgaggacaccgccgtgtactactgcgccagaggcagcgcctactactacgacttcgccgactactggggccaaggcaccctggtgaccgtgtcttcc

SEQ ID NO: 336 - DNA, 3357 bp, Artificial Sequence
  source: /note="Description of Artificial Sequence: Synthetic HC CD3cap137-ALB-MC2-hF3.5Fd-CD16 sequence"
caggacggcaacgaggagatgggcggcatcacccagacaccatacaaggtgagcatctccggcaccacagtgatcctgaccggaggaggcagcggaggaggctccggaggcggctctgaggtggcccacaggttcaaggatctgggcgaggagaacttcaaggccctggtgctgatcgccttcgcccagtatctgcagcagtgcccctttgaggaccacgtgaagctggtgaacgaggtgaccgagttcgccaagacatgcgtggccgacgagtccgccgagaattgtgataagtctctgcacaccctgtttggcgataagctgtgcaccgtggccacactgagggagacatacggcgagatggccgactgctgtgccaagcaggagcccgagcgcaacgagtgcttcctgcagcacaaggacgataaccctaatctgccacggctggtgagacctgaggtggacgtgatgtgcaccgccttccacgataatgaggagacatttctgaagaagtacctgtatgagatcgcccggagacacccttacttttatgccccagagctgctgttctttgccaagcggtacaaggcagccttcaccgagtgctgtcaggcagcagataaagcagcatgcctgctgccaaagctggacgagctgagggatgagggcaaggcaagctccgccaagcagcgcctgaagtgtgcaagcctgcagaagttcggagagagggcctttaaggcatgggcagtggcaaggctgtcccagcggttcccaaaggccgagtttgccgaggtgtctaagctggtgaccgacctgacaaaggtgcacaccgagtgctgtcacggcgacctgctggagtgcgcagacgatagagccgatctggccaagtacatctgtgagaaccaggactctatctctagcaagctgaaggagtgctgtgagaagcccctgctggagaagtcccactgcatcgccgaggtggagaacgacgagatgccagcagatctgccaagcctggcagcagacttcgtggagtccaaggacgtgtgcaagaattacgccgaggccaaggacgtgttcctgggcatgtttctgtacgagtatgccaggcgccaccctgactactccgtggtgctgctgctgcggctggccaagacctatgagaccacactggagaagtgctgtgccgccgccgacccccacgagtgctatgcaaaggtgttcgacgagtttaagcccctggtggaggagcctcagaacctgatcaagcagaattgtgagctgtttgagcagctgggcgagtacaagttccagaacgccctgctggtgagatataccaagaaggtgccacaggtgtctacccccacactggtggaggtgagccggaatctgggcaaggtcggctccaagtgctgtaagcaccctgaggccaagagaatgccatgcgccgaggattacctgtccgtggtgctgaaccagctgtgcgtgctgcacgagaagacccccgtgagcgacagggtgaccaagtgctgtacagagtctctggtgaaccggagaccatgctttagcgccctggaggtggatgagacatatgtgcccaaggagttcaatgccgagaccttcacatttcacgccgacatctgtaccctgagcgagaaggagcgccagatcaagaagcagacagccctggtggagctggtgaagcacaagccaaaggccaccaaggagcagctgaaggccgtgatggacgatttcgccgcctttgtggagaagtgctgtaaggccgacgataaggagacatgcttcgcagaggagggcaagaagctggtggcagcaagccaggcagcaggaggctccggcggctctccactgggcctggccggcctgagcggccggagcgacaaccacggcggcagcggcggctccgaggtgcagctggtggagtccggcggcggcctggtgcagcccggcggcagcctgaggctgtcctgcgccgcctctggcttcacctttaacacatacgcaatgaattgggtgcgccaggcaccaggcaagggactggagtgggtggcccggatcagaagcaagtacaacaattatgccacctactatgccgactccgtgaaggatcggtttaccatcagcagagacgattccaagaacacactgtatctgcagatgaatagcctgcgggccgaggatacagccgtgtactattgcgtgagacacggcaactttggcaattcttacgtgagctggttcgcctattggggccagggcaccatggtgacagtgtcctctgcctctaccaagggacctagcgtgttcccactggcacctagctccaagtctaccagcggaggcacagccgccctgggatgtctggtgaaggactactttccagagcccgtgacagtgtcctggaactctggcgccctgaccagcggagtgcacacattccctgccgtgctgcagtctagcggcctgtactccctgtcctctgtggtgaccgtgccaagctcctctctgggcacccagacatatatctgcaacgtgaatcacaagccctctaatacaaaggtggacaagagggtggagcctaagagctgccccccttgtggcggaggcggtagctcttacgtgctgacccagcctagcagcgtgtccgtggctccaggccagaccgctacaatcagctgcggcggacacaacatcggctctaagaacgtgcactggtaccaacagcggcctggccagtcccctgtgctcgttatctaccaggacaacaagcggcccagcggcattcctgagagattcagcggcagcaatagcggcaacaccgccaccctgacaatctctggcacacaggccatggacgaggccgattactattgccaggtgtgggataattacagcgtcctgttcggcggcggcaccaagctgacagtgctgggaggcggcggttccggcggcggaggcagcggcggcggaggctctcaggtccagctggtgcagagcggcgctgaggtgaagaagcccggagaaagcctgaaggtgagctgtaaagccagcggctacacctttacatcttattacatgcactgggtgcggcaggcccctggacaaggcctggaatggatgggcatcatcaaccccagcggcggaagcaccagctacgcccagaaattccagggcagagtgacaatgaccagagataccagcacaagcaccgtgtacatggaactgagctccctgagaagcgaggacaccgccgtgtactactgcgccagaggcagcgcctactactacgacttcgccgactactggggccaaggcaccctggtgaccgtgtcttcc

SEQ ID NO: 337 - DNA, 1449 bp, Artificial Sequence
  source: /note="Description of Artificial Sequence: Synthetic HC h1F3.5FdMut3-CD16_ScFv(L-H) sequence"
ggcggcagcggcggctccgaggtgcagctggtggagtccggcggcggcctggtgcagcccggcggcagcctgaggctgtcctgcgccgcctctggcttcacctttaacacatacgcaatgaattgggtgcgccaggcaccaggcaagggactggagtgggtggcccggatcggcagcggcggaaacggctatgccacctactatgccgactccgtgaaggatcggtttaccatcagcagagacgattccaagaacacactgtatctgcagatgaatagcctgcgggccgaggatacagccgtgtactattgcgtgagacacggcaactttggcgccagcgctcggagctggttcgcctattggggccagggcaccatggtgacagtgtcctctgcctctaccaagggacctagcgtgttcccactggcacctagctccaagtctaccagcggaggcacagccgccctgggatgtctggtgaaggactactttccagagcccgtgacagtgtcctggaactctggcgccctgaccagcggagtgcacacattccctgccgtgctgcagtctagcggcctgtactccctgtcctctgtggtgaccgtgccaagctcctctctgggcacccagacatatatctgcaacgtgaatcacaagccctctaatacaaaggtggacaagagggtggagcctaagagctgccccccttgtggcggaggcggtagctcttacgtgctgacccagcctagcagcgtgtccgtggctccaggccagaccgctacaatcagctgcggcggacacaacatcggctctaagaacgtgcactggtaccaacagcggcctggccagtcccctgtgctcgttatctaccaggacaacaagcggcccagcggcattcctgagagattcagcggcagcaatagcggcaacaccgccaccctgacaatctctggcacacaggccatggacgaggccgattactattgccaggtgtgggataattacagcgtcctgttcggcggcggcaccaagctgacagtgctgggaggcggcggttccggcggcggaggcagcggcggcggaggctctcaggtccagctggtgcagagcggcgctgaggtgaagaagcccggagaaagcctgaaggtgagctgtaaagccagcggctacacctttacatcttattacatgcactgggtgcggcaggcccctggacaaggcctggaatggatgggcatcatcaaccccagcggcggaagcaccagctacgcccagaaattccagggcagagtgacaatgaccagagataccagcacaagcaccgtgtacatggaactgagctccctgagaagcgaggacaccgccgtgtactactgcgccagaggcagcgcctactactacgacttcgccgactactggggccaaggcaccctggtgaccgtgtcttcc

SEQ ID NO: 338 - DNA, 3360 bp, Artificial Sequence
  source: /note="Description of Artificial Sequence: Synthetic HC CD3cap137-ALB-NC-hF3.5Fd-CD16 sequence"
caggacggcaacgaggagatgggcggcatcacccagacaccatacaaggtgagcatctccggcaccacagtgatcctgaccggaggaggcagcggaggaggctccggaggcggctctgaggtggcccacaggttcaaggatctgggcgaggagaacttcaaggccctggtgctgatcgccttcgcccagtatctgcagcagtgcccctttgaggaccacgtgaagctggtgaacgaggtgaccgagttcgccaagacatgcgtggccgacgagtccgccgagaattgtgataagtctctgcacaccctgtttggcgataagctgtgcaccgtggccacactgagggagacatacggcgagatggccgactgctgtgccaagcaggagcccgagcgcaacgagtgcttcctgcagcacaaggacgataaccctaatctgccacggctggtgagacctgaggtggacgtgatgtgcaccgccttccacgataatgaggagacatttctgaagaagtacctgtatgagatcgcccggagacacccttacttttatgccccagagctgctgttctttgccaagcggtacaaggcagccttcaccgagtgctgtcaggcagcagataaggcagcatgcctgctgccaaagctggacgagctgagggatgagggcaaggcaagctccgccaagcagcgcctgaagtgtgcaagcctgcagaagttcggagagagggcctttaaggcatgggcagtggcaaggctgtcccagcggttcccaaaggccgagtttgccgaggtgtctaagctggtgaccgacctgacaaaggtgcacaccgagtgctgtcacggcgacctgctggagtgcgcagacgatagagccgatctggccaagtacatctgtgagaaccaggactctatctctagcaagctgaaggagtgctgtgagaagcccctgctggagaagtcccactgcatcgccgaggtggagaacgacgagatgccagcagatctgccaagcctggcagcagacttcgtggagtccaaggacgtgtgcaagaattacgccgaggccaaggacgtgttcctgggcatgtttctgtacgagtatgccaggcgccaccctgactactccgtggtgctgctgctgcggctggccaagacctatgagaccacactggagaagtgctgtgccgccgccgacccccacgagtgctatgcaaaggtgttcgacgagtttaagcccctggtggaggagcctcagaacctgatcaagcagaattgtgagctgtttgagcagctgggcgagtacaagttccagaacgccctgctggtgagatataccaagaaggtgccacaggtgtctacccccacactggtggaggtgagccggaatctgggcaaggtcggctccaagtgctgtaagcaccctgaggccaagagaatgccatgcgccgaggattacctgtccgtggtgctgaaccagctgtgcgtgctgcacgagaagacccccgtgagcgacagggtgaccaagtgctgtacagagtctctggtgaaccggagaccatgctttagcgccctggaggtggatgagacatatgtgcccaaggagttcaatgccgagaccttcacatttcacgccgacatctgtaccctgagcgagaaggagcgccagatcaagaagcagacagccctggtggagctggtgaagcacaagccaaaggccaccaaggagcagctgaaggccgtgatggacgatttcgccgcctttgtggagaagtgctgtaaggccgacgataaggagacatgcttcgcagaggagggcaagaagctggtggcagcaagccaggcagcaggaggctccggcggctctggtggcagtggagggagcggtggatctggcgggtcaggcgggtccggcggcagcggcggctccgaggtgcagctggtggagtccggcggcggcctggtgcagcccggcggcagcctgaggctgtcctgcgccgcctctggcttcacctttaacacatacgcaatgaattgggtgcgccaggcaccaggcaagggactggagtgggtggcccggatcagaagcaagtacaacaattatgccacctactatgccgactccgtgaaggatcggtttaccatcagcagagacgattccaagaacacactgtatctgcagatgaatagcctgcgggccgaggatacagccgtgtactattgcgtgagacacggcaactttggcaattcttacgtgagctggttcgcctattggggccagggcaccatggtgacagtgtcctctgcctctaccaagggacctagcgtgttcccactggcacctagctccaagtctaccagcggaggcacagccgccctgggatgtctggtgaaggactactttccagagcccgtgacagtgtcctggaactctggcgccctgaccagcggagtgcacacattccctgccgtgctgcagtctagcggcctgtactccctgtcctctgtggtgaccgtgccaagctcctctctgggcacccagacatatatctgcaacgtgaatcacaagccctctaatacaaaggtggacaagagggtggagcctaagagctgccccccttgtggcggaggcggtagctcttacgtgctgacccagcctagcagcgtgtccgtggctccaggccagaccgctacaatcagctgcggcggacacaacatcggctctaagaacgtgcactggtaccaacagcggcctggccagtcccctgtgctcgttatctaccaggacaacaagcggcccagcggcattcctgagagattcagcggcagcaatagcggcaacaccgccaccctgacaatctctggcacacaggccatggacgaggccgattactattgccaggtgtgggataattacagcgtcctgttcggcggcggcaccaagctgacagtgctgggaggcggcggttccggcggcggaggcagcggcggcggaggctctcaggtccagctggtgcagagcggcgctgaggtgaagaagcccggagaaagcctgaaggtgagctgtaaagccagcggctacacctttacatcttattacatgcactgggtgcggcaggcccctggacaaggcctggaatggatgggcatcatcaaccccagcggcggaagcaccagctacgcccagaaattccagggcagagtgacaatgaccagagataccagcacaagcaccgtgtacatggaactgagctccctgagaagcgaggacaccgccgtgtactactgcgccagaggcagcgcctactactacgacttcgccgactactggggccaaggcaccctggtgaccgtgtcttcc

SEQ ID NO: 339 - DNA, 3366 bp, Artificial Sequence
  source: /note="Description of Artificial Sequence: Synthetic CD3cap137-ALB-MMP-hF3.5Fd-NKG2A sequence"
caggacggcaacgaggagatgggcggcatcacccagacaccatacaaggtgagcatctccggcaccacagtgatcctgaccggaggaggcagcggaggaggctccggaggcggctctgaggtggcccacaggttcaaggatctgggcgaggagaacttcaaggccctggtgctgatcgccttcgcccagtatctgcagcagtgcccctttgaggaccacgtgaagctggtgaacgaggtgaccgagttcgccaagacatgcgtggccgacgagtccgccgagaattgtgataagtctctgcacaccctgtttggcgataagctgtgcaccgtggccacactgagggagacatacggcgagatggccgactgctgtgccaagcaggagcccgagcgcaacgagtgcttcctgcagcacaaggacgataaccctaatctgccacggctggtgagacctgaggtggacgtgatgtgcaccgccttccacgataatgaggagacatttctgaagaagtacctgtatgagatcgcccggagacacccttacttttatgccccagagctgctgttctttgccaagcggtacaaggcagccttcaccgagtgctgtcaggcagcagataaagcagcatgcctgctgccaaagctggacgagctgagggatgagggcaaggcaagctccgccaagcagcgcctgaagtgtgcaagcctgcagaagttcggagagagggcctttaaggcatgggcagtggcaaggctgtcccagcggttcccaaaggccgagtttgccgaggtgtctaagctggtgaccgacctgacaaaggtgcacaccgagtgctgtcacggcgacctgctggagtgcgcagacgatagagccgatctggccaagtacatctgtgagaaccaggactctatctctagcaagctgaaggagtgctgtgagaagcccctgctggagaagtcccactgcatcgccgaggtggagaacgacgagatgccagcagatctgccaagcctggcagcagacttcgtggagtccaaggacgtgtgcaagaattacgccgaggccaaggacgtgttcctgggcatgtttctgtacgagtatgccaggcgccaccctgactactccgtggtgctgctgctgcggctggccaagacctatgagaccacactggagaagtgctgtgccgccgccgacccccacgagtgctatgcaaaggtgttcgacgagtttaagcccctggtggaggagcctcagaacctgatcaagcagaattgtgagctgtttgagcagctgggcgagtacaagttccagaacgccctgctggtgagatataccaagaaggtgccacaggtgtctacccccacactggtggaggtgagccggaatctgggcaaggtcggctccaagtgctgtaagcaccctgaggccaagagaatgccatgcgccgaggattacctgtccgtggtgctgaaccagctgtgcgtgctgcacgagaagacccccgtgagcgacagggtgaccaagtgctgtacagagtctctggtgaaccggagaccatgctttagcgccctggaggtggatgagacatatgtgcccaaggagttcaatgccgagaccttcacatttcacgccgacatctgtaccctgagcgagaaggagcgccagatcaagaagcagacagccctggtggagctggtgaagcacaagccaaaggccaccaaggagcagctgaaggccgtgatggacgatttcgccgcctttgtggagaagtgctgtaaggccgacgataaggagacatgcttcgcagaggagggcaagaagctggtggcagcaagccaggcagcaggaggctccggcggctctccactgggcctggccggcggcggcagcggcggctccgaggtgcagctggtggagtccggcggcggcctggtgcagcccggcggcagcctgaggctgtcctgcgccgcctctggcttcacctttaacacatacgcaatgaattgggtgcgccaggcaccaggcaagggactggagtgggtggcccggatcagaagcaagtacaacaattatgccacctactatgccgactccgtgaaggatcggtttaccatcagcagagacgattccaagaacacactgtatctgcagatgaatagcctgcgggccgaggatacagccgtgtactattgcgtgagacacggcaactttggcaattcttacgtgagctggttcgcctattggggccagggcaccatggtgacagtgtcctctgcctctaccaagggacctagcgtgttcccactggcacctagctccaagtctaccagcggaggcacagccgccctgggatgtctggtgaaggactactttccagagcccgtgacagtgtcctggaactctggcgccctgaccagcggagtgcacacattccctgccgtgctgcagtctagcggcctgtactccctgtcctctgtggtgaccgtgccaagctcctctctgggcacccagacatatatctgcaacgtgaatcacaagccctctaatacaaaggtggacaagagggtggagcctaagagctgccccccttgtggcggaggcggtagcgacatccagatgacacagtctccctcttccctgtctgcttccgtgggcgatagagtgacaatcacctgtcgcgccagcgagaacatctactcttatctggcttggtaccagcagaagcccggcaaggcccctaagctgctgatctataatgccaagacactggctgagggcgtgccttccaggttcagcggatctggatccggaaccgactttacactgaccatcagctctctgcagccagaggattttgccacatactattgccagcatcattacggaacaccaagaacattcggcgggggaacaaaagtggaaatcaagggcggaggcgggtctggaggtggagggagtggaggaggggggagcggtgggggaggtagccaggtccagctggtgcagtcaggagccgaggtgaagaagccaggggcatcagtcaaggtgtcatgtaaagcatcaggttatacttttacctcctactggatgaactgggtgaggcaggctccaggacagggcctggagtggatgggaaggatcgacccctacgatagcgagacacactatgctcagaagctgcagggcagagtgaccatgaccacagacacctccacaagcaccgcctatatggagctgaggagcctgcggtctgacgataccgccgtgtactattgcgctcgcggcggctacgacttcgatgtgggcacactgtattggttctttgacgtgtggggccagggcaccacagtgaccgtgtccagc

SEQ ID NO: 340 - DNA, 3402 bp, Artificial Sequence
  source: /note="Description of Artificial Sequence: Synthetic CD3cap137-ALB-MC2v2-hF3.5Fd-NKG2A sequence"
caggacggcaacgaggagatgggcggcatcacccagacaccatacaaggtgagcatctccggcaccacagtgatcctgaccggaggaggcagcggaggaggctccggaggcggctctgaggtggcccacaggttcaaggatctgggcgaggagaacttcaaggccctggtgctgatcgccttcgcccagtatctgcagcagtgcccctttgaggaccacgtgaagctggtgaacgaggtgaccgagttcgccaagacatgcgtggccgacgagtccgccgagaattgtgataagtctctgcacaccctgtttggcgataagctgtgcaccgtggccacactgagggagacatacggcgagatggccgactgctgtgccaagcaggagcccgagcgcaacgagtgcttcctgcagcacaaggacgataaccctaatctgccacggctggtgagacctgaggtggacgtgatgtgcaccgccttccacgataatgaggagacatttctgaagaagtacctgtatgagatcgcccggagacacccttacttttatgccccagagctgctgttctttgccaagcggtacaaggcagccttcaccgagtgctgtcaggcagcagataaagcagcatgcctgctgccaaagctggacgagctgagggatgagggcaaggcaagctccgccaagcagcgcctgaagtgtgcaagcctgcagaagttcggagagagggcctttaaggcatgggcagtggcaaggctgtcccagcggttcccaaaggccgagtttgccgaggtgtctaagctggtgaccgacctgacaaaggtgcacaccgagtgctgtcacggcgacctgctggagtgcgcagacgatagagccgatctggccaagtacatctgtgagaaccaggactctatctctagcaagctgaaggagtgctgtgagaagcccctgctggagaagtcccactgcatcgccgaggtggagaacgacgagatgccagcagatctgccaagcctggcagcagacttcgtggagtccaaggacgtgtgcaagaattacgccgaggccaaggacgtgttcctgggcatgtttctgtacgagtatgccaggcgccaccctgactactccgtggtgctgctgctgcggctggccaagacctatgagaccacactggagaagtgctgtgccgccgccgacccccacgagtgctatgcaaaggtgttcgacgagtttaagcccctggtggaggagcctcagaacctgatcaagcagaattgtgagctgtttgagcagctgggcgagtacaagttccagaacgccctgctggtgagatataccaagaaggtgccacaggtgtctacccccacactggtggaggtgagccggaatctgggcaaggtcggctccaagtgctgtaagcaccctgaggccaagagaatgccatgcgccgaggattacctgtccgtggtgctgaaccagctgtgcgtgctgcacgagaagacccccgtgagcgacagggtgaccaagtgctgtacagagtctctggtgaaccggagaccatgctttagcgccctggaggtggatgagacatatgtgcccaaggagttcaatgccgagaccttcacatttcacgccgacatctgtaccctgagcgagaaggagcgccagatcaagaagcagacagccctggtggagctggtgaagcacaagccaaaggccaccaaggagcagctgaaggccgtgatggacgatttcgccgcctttgtggagaagtgctgtaaggccgacgataaggagacatgcttcgcagaggagggcaagaagctggtggcagcaagccaggcagcaggaggctccggcggctctccactgggcctggccggcggttctggatccctgagcggccggagcgacaaccacggcggcagcggcggctccgaggtgcagctggtggagtccggcggcggcctggtgcagcccggcggcagcctgaggctgtcctgcgccgcctctggcttcacctttaacacatacgcaatgaattgggtgcgccaggcaccaggcaagggactggagtgggtggcccggatcagaagcaagtacaacaattatgccacctactatgccgactccgtgaaggatcggtttaccatcagcagagacgattccaagaacacactgtatctgcagatgaatagcctgcgggccgaggatacagccgtgtactattgcgtgagacacggcaactttggcaattcttacgtgagctggttcgcctattggggccagggcaccatggtgacagtgtcctctgcctctaccaagggacctagcgtgttcccactggcacctagctccaagtctaccagcggaggcacagccgccctgggatgtctggtgaaggactactttccagagcccgtgacagtgtcctggaactctggcgccctgaccagcggagtgcacacattccctgccgtgctgcagtctagcggcctgtactccctgtcctctgtggtgaccgtgccaagctcctctctgggcacccagacatatatctgcaacgtgaatcacaagccctctaatacaaaggtggacaagagggtggagcctaagagctgccccccttgtggcggaggcggtagcgacatccagatgacacagtctccctcttccctgtctgcttccgtgggcgatagagtgacaatcacctgtcgcgccagcgagaacatctactcttatctggcttggtaccagcagaagcccggcaaggcccctaagctgctgatctataatgccaagacactggctgagggcgtgccttccaggttcagcggatctggatccggaaccgactttacactgaccatcagctctctgcagccagaggattttgccacatactattgccagcatcattacggaacaccaagaacattcggcgggggaacaaaagtggaaatcaagggcggaggcgggtctggaggtggagggagtggaggaggggggagcggtgggggaggtagccaggtccagctggtgcagtcaggagccgaggtgaagaagccaggggcatcagtcaaggtgtcatgtaaagcatcaggttatacttttacctcctactggatgaactgggtgaggcaggctccaggacagggcctggagtggatgggaaggatcgacccctacgatagcgagacacactatgctcagaagctgcagggcagagtgaccatgaccacagacacctccacaagcaccgcctatatggagctgaggagcctgcggtctgacgataccgccgtgtactattgcgctcgcggcggctacgacttcgatgtgggcacactgtattggttctttgacgtgtggggccagggcaccacagtgaccgtgtccagc

SEQ ID NO: 341 - DNA, 3408 bp, Artificial Sequence
  source: /note="Description of Artificial Sequence: Synthetic CD3cap137-ALB-MC2v3-hF3.5Fd-NKG2A sequence"
caggacggcaacgaggagatgggcggcatcacccagacaccatacaaggtgagcatctccggcaccacagtgatcctgaccggaggaggcagcggaggaggctccggaggcggctctgaggtggcccacaggttcaaggatctgggcgaggagaacttcaaggccctggtgctgatcgccttcgcccagtatctgcagcagtgcccctttgaggaccacgtgaagctggtgaacgaggtgaccgagttcgccaagacatgcgtggccgacgagtccgccgagaattgtgataagtctctgcacaccctgtttggcgataagctgtgcaccgtggccacactgagggagacatacggcgagatggccgactgctgtgccaagcaggagcccgagcgcaacgagtgcttcctgcagcacaaggacgataaccctaatctgccacggctggtgagacctgaggtggacgtgatgtgcaccgccttccacgataatgaggagacatttctgaagaagtacctgtatgagatcgcccggagacacccttacttttatgccccagagctgctgttctttgccaagcggtacaaggcagccttcaccgagtgctgtcaggcagcagataaagcagcatgcctgctgccaaagctggacgagctgagggatgagggcaaggcaagctccgccaagcagcgcctgaagtgtgcaagcctgcagaagttcggagagagggcctttaaggcatgggcagtggcaaggctgtcccagcggttcccaaaggccgagtttgccgaggtgtctaagctggtgaccgacctgacaaaggtgcacaccgagtgctgtcacggcgacctgctggagtgcgcagacgatagagccgatctggccaagtacatctgtgagaaccaggactctatctctagcaagctgaaggagtgctgtgagaagcccctgctggagaagtcccactgcatcgccgaggtggagaacgacgagatgccagcagatctgccaagcctggcagcagacttcgtggagtccaaggacgtgtgcaagaattacgccgaggccaaggacgtgttcctgggcatgtttctgtacgagtatgccaggcgccaccctgactactccgtggtgctgctgctgcggctggccaagacctatgagaccacactggagaagtgctgtgccgccgccgacccccacgagtgctatgcaaaggtgttcgacgagtttaagcccctggtggaggagcctcagaacctgatcaagcagaattgtgagctgtttgagcagctgggcgagtacaagttccagaacgccctgctggtgagatataccaagaaggtgccacaggtgtctacccccacactggtggaggtgagccggaatctgggcaaggtcggctccaagtgctgtaagcaccctgaggccaagagaatgccatgcgccgaggattacctgtccgtggtgctgaaccagctgtgcgtgctgcacgagaagacccccgtgagcgacagggtgaccaagtgctgtacagagtctctggtgaaccggagaccatgctttagcgccctggaggtggatgagacatatgtgcccaaggagttcaatgccgagaccttcacatttcacgccgacatctgtaccctgagcgagaaggagcgccagatcaagaagcagacagccctggtggagctggtgaagcacaagccaaaggccaccaaggagcagctgaaggccgtgatggacgatttcgccgcctttgtggagaagtgctgtaaggccgacgataaggagacatgcttcgcagaggagggcaagaagctggtggcagcaagccaggcagcaggaggctccggcggctctccactgggcctggccggcggttctggatccgggtctctgagcggccggagcgacaaccacggcggcagcggcggctccgaggtgcagctggtggagtccggcggcggcctggtgcagcccggcggcagcctgaggctgtcctgcgccgcctctggcttcacctttaacacatacgcaatgaattgggtgcgccaggcaccaggcaagggactggagtgggtggcccggatcagaagcaagtacaacaattatgccacctactatgccgactccgtgaaggatcggtttaccatcagcagagacgattccaagaacacactgtatctgcagatgaatagcctgcgggccgaggatacagccgtgtactattgcgtgagacacggcaactttggcaattcttacgtgagctggttcgcctattggggccagggcaccatggtgacagtgtcctctgcctctaccaagggacctagcgtgttcccactggcacctagctccaagtctaccagcggaggcacagccgccctgggatgtctggtgaaggactactttccagagcccgtgacagtgtcctggaactctggcgccctgaccagcggagtgcacacattccctgccgtgctgcagtctagcggcctgtactccctgtcctctgtggtgaccgtgccaagctcctctctgggcacccagacatatatctgcaacgtgaatcacaagccctctaatacaaaggtggacaagagggtggagcctaagagctgccccccttgtggcggaggcggtagcgacatccagatgacacagtctccctcttccctgtctgcttccgtgggcgatagagtgacaatcacctgtcgcgccagcgagaacatctactcttatctggcttggtaccagcagaagcccggcaaggcccctaagctgctgatctataatgccaagacactggctgagggcgtgccttccaggttcagcggatctggatccggaaccgactttacactgaccatcagctctctgcagccagaggattttgccacatactattgccagcatcattacggaacaccaagaacattcggcgggggaacaaaagtggaaatcaagggcggaggcgggtctggaggtggagggagtggaggaggggggagcggtgggggaggtagccaggtccagctggtgcagtcaggagccgaggtgaagaagccaggggcatcagtcaaggtgtcatgtaaagcatcaggttatacttttacctcctactggatgaactgggtgaggcaggctccaggacagggcctggagtggatgggaaggatcgacccctacgatagcgagacacactatgctcagaagctgcagggcagagtgaccatgaccacagacacctccacaagcaccgcctatatggagctgaggagcctgcggtctgacgataccgccgtgtactattgcgctcgcggcggctacgacttcgatgtgggcacactgtattggttctttgacgtgtggggccagggcaccacagtgaccgtgtccagc

SEQ ID NO: 342 - DNA, 3423 bp, Artificial Sequence
  source: /note="Description of Artificial Sequence: Synthetic CD3cap137-ALB-MC3v2-hF3.5Fd-NKG2A sequence"
caggacggcaacgaggagatgggcggcatcacccagacaccatacaaggtgagcatctccggcaccacagtgatcctgaccggaggaggcagcggaggaggctccggaggcggctctgaggtggcccacaggttcaaggatctgggcgaggagaacttcaaggccctggtgctgatcgccttcgcccagtatctgcagcagtgcccctttgaggaccacgtgaagctggtgaacgaggtgaccgagttcgccaagacatgcgtggccgacgagtccgccgagaattgtgataagtctctgcacaccctgtttggcgataagctgtgcaccgtggccacactgagggagacatacggcgagatggccgactgctgtgccaagcaggagcccgagcgcaacgagtgcttcctgcagcacaaggacgataaccctaatctgccacggctggtgagacctgaggtggacgtgatgtgcaccgccttccacgataatgaggagacatttctgaagaagtacctgtatgagatcgcccggagacacccttacttttatgccccagagctgctgttctttgccaagcggtacaaggcagccttcaccgagtgctgtcaggcagcagataaggcagcatgcctgctgccaaagctggacgagctgagggatgagggcaaggcaagctccgccaagcagcgcctgaagtgtgcaagcctgcagaagttcggagagagggcctttaaggcatgggcagtggcaaggctgtcccagcggttcccaaaggccgagtttgccgaggtgtctaagctggtgaccgacctgacaaaggtgcacaccgagtgctgtcacggcgacctgctggagtgcgcagacgatagagccgatctggccaagtacatctgtgagaaccaggactctatctctagcaagctgaaggagtgctgtgagaagcccctgctggagaagtcccactgcatcgccgaggtggagaacgacgagatgccagcagatctgccaagcctggcagcagacttcgtggagtccaaggacgtgtgcaagaattacgccgaggccaaggacgtgttcctgggcatgtttctgtacgagtatgccaggcgccaccctgactactccgtggtgctgctgctgcggctggccaagacctatgagaccacactggagaagtgctgtgccgccgccgacccccacgagtgctatgcaaaggtgttcgacgagtttaagcccctggtggaggagcctcagaacctgatcaagcagaattgtgagctgtttgagcagctgggcgagtacaagttccagaacgccctgctggtgagatataccaagaaggtgccacaggtgtctacccccacactggtggaggtgagccggaatctgggcaaggtcggctccaagtgctgtaagcaccctgaggccaagagaatgccatgcgccgaggattacctgtccgtggtgctgaaccagctgtgcgtgctgcacgagaagacccccgtgagcgacagggtgaccaagtgctgtacagagtctctggtgaaccggagaccatgctttagcgccctggaggtggatgagacatatgtgcccaaggagttcaatgccgagaccttcacatttcacgccgacatctgtaccctgagcgagaaggagcgccagatcaagaagcagacagccctggtggagctggtgaagcacaagccaaaggccaccaaggagcagctgaaggccgtgatggacgatttcgccgcctttgtggagaagtgctgtaaggccgacgataaggagacatgcttcgcagaggagggcaagaagctggtggcagcaagccaggcagcaggtggtagcggcggcagtcctctgggactggcgggcggcagcgggtctggccggaagggaagtggcagtctttctggcagaagcgacaatcacggcggttccggaggttccgaggtgcagctggtggagtccggcggcggcctggtgcagcccggcggcagcctgaggctgtcctgcgccgcctctggcttcacctttaacacatacgcaatgaattgggtgcgccaggcaccaggcaagggactggagtgggtggcccggatcagaagcaagtacaacaattatgccacctactatgccgactccgtgaaggatcggtttaccatcagcagagacgattccaagaacacactgtatctgcagatgaatagcctgcgggccgaggatacagccgtgtactattgcgtgagacacggcaactttggcaattcttacgtgagctggttcgcctattggggccagggcaccatggtgacagtgtcctctgcctctaccaagggacctagcgtgttcccactggcacctagctccaagtctaccagcggaggcacagccgccctgggatgtctggtgaaggactactttccagagcccgtgacagtgtcctggaactctggcgccctgaccagcggagtgcacacattccctgccgtgctgcagtctagcggcctgtactccctgtcctctgtggtgaccgtgccaagctcctctctgggcacccagacatatatctgcaacgtgaatcacaagccctctaatacaaaggtggacaagagggtggagcctaagagctgccccccttgtggcggaggcggtagcgacatccagatgacacagtctccctcttccctgtctgcttccgtgggcgatagagtgacaatcacctgtcgcgccagcgagaacatctactcttatctggcttggtaccagcagaagcccggcaaggcccctaagctgctgatctataatgccaagacactggctgagggcgtgccttccaggttcagcggatctggatccggaaccgactttacactgaccatcagctctctgcagccagaggattttgccacatactattgccagcatcattacggaacaccaagaacattcggcgggggaacaaaagtggaaatcaagggcggaggcgggtctggaggtggagggagtggaggaggggggagcggtgggggaggtagccaggtccagctggtgcagtcaggagccgaggtgaagaagccaggggcatcagtcaaggtgtcatgtaaagcatcaggttatacttttacctcctactggatgaactgggtgaggcaggctccaggacagggcctggagtggatgggaaggatcgacccctacgatagcgagacacactatgctcagaagctgcagggcagagtgaccatgaccacagacacctccacaagcaccgcctatatggagctgaggagcctgcggtctgacgataccgccgtgtactattgcgctcgcggcggctacgacttcgatgtgggcacactgtattggttctttgacgtgtggggccagggcaccacagtgaccgtgtccagc

SEQ ID NO: 343 - DNA, 3435 bp, Artificial Sequence
  source: /note="Description of Artificial Sequence: Synthetic CD3cap137-ALB-MC3v3-hF3.5Fd-NKG2A sequence"
caggacggcaacgaggagatgggcggcatcacccagacaccatacaaggtgagcatctccggcaccacagtgatcctgaccggaggaggcagcggaggaggctccggaggcggctctgaggtggcccacaggttcaaggatctgggcgaggagaacttcaaggccctggtgctgatcgccttcgcccagtatctgcagcagtgcccctttgaggaccacgtgaagctggtgaacgaggtgaccgagttcgccaagacatgcgtggccgacgagtccgccgagaattgtgataagtctctgcacaccctgtttggcgataagctgtgcaccgtggccacactgagggagacatacggcgagatggccgactgctgtgccaagcaggagcccgagcgcaacgagtgcttcctgcagcacaaggacgataaccctaatctgccacggctggtgagacctgaggtggacgtgatgtgcaccgccttccacgataatgaggagacatttctgaagaagtacctgtatgagatcgcccggagacacccttacttttatgccccagagctgctgttctttgccaagcggtacaaggcagccttcaccgagtgctgtcaggcagcagataaggcagcatgcctgctgccaaagctggacgagctgagggatgagggcaaggcaagctccgccaagcagcgcctgaagtgtgcaagcctgcagaagttcggagagagggcctttaaggcatgggcagtggcaaggctgtcccagcggttcccaaaggccgagtttgccgaggtgtctaagctggtgaccgacctgacaaaggtgcacaccgagtgctgtcacggcgacctgctggagtgcgcagacgatagagccgatctggccaagtacatctgtgagaaccaggactctatctctagcaagctgaaggagtgctgtgagaagcccctgctggagaagtcccactgcatcgccgaggtggagaacgacgagatgccagcagatctgccaagcctggcagcagacttcgtggagtccaaggacgtgtgcaagaattacgccgaggccaaggacgtgttcctgggcatgtttctgtacgagtatgccaggcgccaccctgactactccgtggtgctgctgctgcggctggccaagacctatgagaccacactggagaagtgctgtgccgccgccgacccccacgagtgctatgcaaaggtgttcgacgagtttaagcccctggtggaggagcctcagaacctgatcaagcagaattgtgagctgtttgagcagctgggcgagtacaagttccagaacgccctgctggtgagatataccaagaaggtgccacaggtgtctacccccacactggtggaggtgagccggaatctgggcaaggtcggctccaagtgctgtaagcaccctgaggccaagagaatgccatgcgccgaggattacctgtccgtggtgctgaaccagctgtgcgtgctgcacgagaagacccccgtgagcgacagggtgaccaagtgctgtacagagtctctggtgaaccggagaccatgctttagcgccctggaggtggatgagacatatgtgcccaaggagttcaatgccgagaccttcacatttcacgccgacatctgtaccctgagcgagaaggagcgccagatcaagaagcagacagccctggtggagctggtgaagcacaagccaaaggccaccaaggagcagctgaaggccgtgatggacgatttcgccgcctttgtggagaagtgctgtaaggccgacgataaggagacatgcttcgcagaggagggcaagaagctggtggcagcaagccaggcagcaggtggtagcggcggcagtcctctgggactggcgggcggcagcgggtctggtagcggccggaagggaagtggcagtgggagcctttctggcagaagcgacaatcacggcggttccggaggttccgaggtgcagctggtggagtccggcggcggcctggtgcagcccggcggcagcctgaggctgtcctgcgccgcctctggcttcacctttaacacatacgcaatgaattgggtgcgccaggcaccaggcaagggactggagtgggtggcccggatcagaagcaagtacaacaattatgccacctactatgccgactccgtgaaggatcggtttaccatcagcagagacgattccaagaacacactgtatctgcagatgaatagcctgcgggccgaggatacagccgtgtactattgcgtgagacacggcaactttggcaattcttacgtgagctggttcgcctattggggccagggcaccatggtgacagtgtcctctgcctctaccaagggacctagcgtgttcccactggcacctagctccaagtctaccagcggaggcacagccgccctgggatgtctggtgaaggactactttccagagcccgtgacagtgtcctggaactctggcgccctgaccagcggagtgcacacattccctgccgtgctgcagtctagcggcctgtactccctgtcctctgtggtgaccgtgccaagctcctctctgggcacccagacatatatctgcaacgtgaatcacaagccctctaatacaaaggtggacaagagggtggagcctaagagctgccccccttgtggcggaggcggtagcgacatccagatgacacagtctccctcttccctgtctgcttccgtgggcgatagagtgacaatcacctgtcgcgccagcgagaacatctactcttatctggcttggtaccagcagaagcccggcaaggcccctaagctgctgatctataatgccaagacactggctgagggcgtgccttccaggttcagcggatctggatccggaaccgactttacactgaccatcagctctctgcagccagaggattttgccacatactattgccagcatcattacggaacaccaagaacattcggcgggggaacaaaagtggaaatcaagggcggaggcgggtctggaggtggagggagtggaggaggggggagcggtgggggaggtagccaggtccagctggtgcagtcaggagccgaggtgaagaagccaggggcatcagtcaaggtgtcatgtaaagcatcaggttatacttttacctcctactggatgaactgggtgaggcaggctccaggacagggcctggagtggatgggaaggatcgacccctacgatagcgagacacactatgctcagaagctgcagggcagagtgaccatgaccacagacacctccacaagcaccgcctatatggagctgaggagcctgcggtctgacgataccgccgtgtactattgcgctcgcggcggctacgacttcgatgtgggcacactgtattggttctttgacgtgtggggccagggcaccacagtgaccgtgtccagc

SEQ ID NO: 344 - protein, 471 aa, Artificial Sequence
  source: /note="Description of Artificial Sequence: Synthetic 1F3.1-lambda-5T4IM11_VL1-VH1 sequence"
GGSGGSQAVVTQEPSLTVSPGGTVTLTCRSSTGAVTTSNYANWVQQKPGQAPRGLIGGTNKRAPGTPARFSGSLLGGKAALTLSGVQPEDEAEYYCALWYSNLWVFGGGTKLTVLGQPKAAPSVTLFPPSSEELQANKATLVCLISDFYPGAVTVAWKADSSPVKAGVETTTPSKQSNNKYAASSYLSLTPEQWKSHRSYSCQVTHEGSTVEKTVAPTECPPCSGGGSEIVLTQSPATLSLSPGERATLSCKASQNVGTAVAWYQQKPGQAPRLLIYSASNRYTGIPARFSGSGSGTDFTLTISSLEPEDFAVYYCQQYTSYPRTFGGGTKVEIKGGGGSGGGGSGGGGSGGGGSQVLLVQSGAEVKKPGASVKVSCKASGYTFTAYHIHWVRQAPGQGLEWMGIILPGRGSTTYAQKFQGRVTMTRDTSTSTVYMELSSLRSEDAAVYYCARGYRDFDYWGQGTLVTVST

SEQ ID NO: 345 - protein, 471 aa, Artificial Sequence
  source: /note="Description of Artificial Sequence: Synthetic 1F3.1-lambda-5T4IM12_VL3-VH1 sequence"
GGSGGSQAVVTQEPSLTVSPGGTVTLTCRSSTGAVTTSNYANWVQQKPGQAPRGLIGGTNKRAPGTPARFSGSLLGGKAALTLSGVQPEDEAEYYCALWYSNLWVFGGGTKLTVLGQPKAAPSVTLFPPSSEELQANKATLVCLISDFYPGAVTVAWKADSSPVKAGVETTTPSKQSNNKYAASSYLSLTPEQWKSHRSYSCQVTHEGSTVEKTVAPTECPPCSGGGSEIVLTQSPATLSLSPGERATLSCKASQNVGTAVAWYQQKPGQTPRLLIYSASNRYTGIPARFSGSGSGTDFTLTISSLEPEDFAVYYCQQYTSYPRTFGQGTRLEIKGGGGSGGGGSGGGGSGGGGSQVLLVQSGAEVKKPGASVKVSCKASGYTFTAYHIHWVRQAPGQGLEWMGIILPGRGSTTYAQKFQGRVTMTRDTSTSTVYMELSSLRSEDAAVYYCARGYRDFDYWGQGTLVTVST

SEQ ID NO: 346 - protein, 471 aa, Artificial Sequence
  source: /note="Description of Artificial Sequence: Synthetic 1F3.1-lambda-5T4IM13_VL2-VH2 sequence"
GGSGGSQAVVTQEPSLTVSPGGTVTLTCRSSTGAVTTSNYANWVQQKPGQAPRGLIGGTNKRAPGTPARFSGSLLGGKAALTLSGVQPEDEAEYYCALWYSNLWVFGGGTKLTVLGQPKAAPSVTLFPPSSEELQANKATLVCLISDFYPGAVTVAWKADSSPVKAGVETTTPSKQSNNKYAASSYLSLTPEQWKSHRSYSCQVTHEGSTVEKTVAPTECPPCSGGGSEKVMTQSPATLSVSPGERATLSCKASQNVGTAVAWYQQRPGQAPSLLIYSASNRYTGIPARFSGSGSGTEFTLTISSLQSEDFAVYYCQQYTSYPRTFGQGTRVDIKGGGGSGGGGSGGGGSGGGGSQVQLVQSGAEVRKPGASVRVSCKASGYTFTAYYMHWVRKAPGQGLEWLGRILPGRGSTMYAEKFQGRVTMTRDTSTSTDYMELSSLRSEDTAVYYCARGYRDFDYWGQGTLVTVSS

SEQ ID NO: 347 - protein, 471 aa, Artificial Sequence
  source: /note="Description of Artificial Sequence: Synthetic 1F3.1-lambda-5T4IM14_VL1-VH3 sequence"
GGSGGSQAVVTQEPSLTVSPGGTVTLTCRSSTGAVTTSNYANWVQQKPGQAPRGLIGGTNKRAPGTPARFSGSLLGGKAALTLSGVQPEDEAEYYCALWYSNLWVFGGGTKLTVLGQPKAAPSVTLFPPSSEELQANKATLVCLISDFYPGAVTVAWKADSSPVKAGVETTTPSKQSNNKYAASSYLSLTPEQWKSHRSYSCQVTHEGSTVEKTVAPTECPPCSGGGSEIVLTQSPATLSLSPGERATLSCKASQNVGTAVAWYQQKPGQAPRLLIYSASNRYTGIPARFSGSGSGTDFTLTISSLEPEDFAVYYCQQYTSYPRTFGGGTKVEIKGGGGSGGGGSGGGGSGGGGSQVQLVQSGPEVKKPGASVRVSCRASGYTFTAYYMHWVRQAPGQGLEWVGRILPGRGSTMYAEKFQGRVTLTRDTSTSTDYMDLSSLKSDDTAIYYCTRGYRDFDYWGQGTTVTVSS

SEQ ID NO: 348 - protein, 471 aa, Artificial Sequence
  source: /note="Description of Artificial Sequence: Synthetic 1F3.1-lambda-5T4IM15_VL3-VH4 sequence"
GGSGGSQAVVTQEPSLTVSPGGTVTLTCRSSTGAVTTSNYANWVQQKPGQAPRGLIGGTNKRAPGTPARFSGSLLGGKAALTLSGVQPEDEAEYYCALWYSNLWVFGGGTKLTVLGQPKAAPSVTLFPPSSEELQANKATLVCLISDFYPGAVTVAWKADSSPVKAGVETTTPSKQSNNKYAASSYLSLTPEQWKSHRSYSCQVTHEGSTVEKTVAPTECPPCSGGGSEIVLTQSPATLSLSPGERATLSCKASQNVGTAVAWYQQKPGQTPRLLIYSASNRYTGIPARFSGSGSGTDFTLTISSLEPEDFAVYYCQQYTSYPRTFGQGTRLEIKGGGGSGGGGSGGGGSGGGGSQMHLVQSGAEVKKPGASVKVSCKPSGYTFTAYYIHWLRQAPGQGLEWVGWILPGRGSTNYAQKFQGRVTMTRDTSISTAYMELASLRSDDTAVYYCARGYRDFDYWGQGTLVTISS

SEQ ID NO: 349 - protein, 478 aa, Artificial Sequence
  source: /note="Description of Artificial Sequence: Synthetic 1F3.1-lambda-5T4IM16_VL1-VH1 sequence"
GGSGGSQAVVTQEPSLTVSPGGTVTLTCRSSTGAVTTSNYANWVQQKPGQAPRGLIGGTNKRAPGTPARFSGSLLGGKAALTLSGVQPEDEAEYYCALWYSNLWVFGGGTKLTVLGQPKAAPSVTLFPPSSEELQANKATLVCLISDFYPGAVTVAWKADSSPVKAGVETTTPSKQSNNKYAASSYLSLTPEQWKSHRSYSCQVTHEGSTVEKTVAPTECPPCSGGGSDIQMTQSPSSLSASVGDRVTITCSASSSVNYMHWFQQKPGKAPKPLIYDTSKLASGVPPKFSGSGSGTDFTLTISSLQPDDFATYYCFQGSGYPYTFGRGTKLEIKGGGGSGGGGSGGGGSGGGGSQVQLLESGAEVKKPGASVKVSCKASGYPFTDYYMHWVRQAPGQGLEWMGWINPYNGDTTYAQKFQGRVTMTRDTSTSTVYMEVSSLRSDDTAVYYCARLRLLYDTSEYYVMDYWGQGTLVTVSS

SEQ ID NO: 350 - protein, 478 aa, Artificial Sequence
  source: /note="Description of Artificial Sequence: Synthetic 1F3.1-lambda-5T4IM17_VL1-VH2 sequence"
GGSGGSQAVVTQEPSLTVSPGGTVTLTCRSSTGAVTTSNYANWVQQKPGQAPRGLIGGTNKRAPGTPARFSGSLLGGKAALTLSGVQPEDEAEYYCALWYSNLWVFGGGTKLTVLGQPKAAPSVTLFPPSSEELQANKATLVCLISDFYPGAVTVAWKADSSPVKAGVETTTPSKQSNNKYAASSYLSLTPEQWKSHRSYSCQVTHEGSTVEKTVAPTECPPCSGGGSDIQMTQSPSSLSASVGDRVTITCSASSSVNYMHWFQQKPGKAPKPLIYDTSKLASGVPPKFSGSGSGTDFTLTISSLQPDDFATYYCFQGSGYPYTFGRGTKLEIKGGGGSGGGGSGGGGSGGGGSQVQLLASGAEVKKPGASVTVSCKASGYPFTDYYLHWVRQAPGQGLEWMGWINPYNGDTNYAPKFHGRVTMTRDTSISTAYMELSRLRSDDTAIYYCARLRLLYDTSEYYVMDYWGQGTTVTVSA

SEQ ID NO: 351 - protein, 478 aa, Artificial Sequence
  source: /note="Description of Artificial Sequence: Synthetic 1F3.1-lambda-5T4IM18_VL1-VH3 sequence"
GGSGGSQAVVTQEPSLTVSPGGTVTLTCRSSTGAVTTSNYANWVQQKPGQAPRGLIGGTNKRAPGTPARFSGSLLGGKAALTLSGVQPEDEAEYYCALWYSNLWVFGGGTKLTVLGQPKAAPSVTLFPPSSEELQANKATLVCLISDFYPGAVTVAWKADSSPVKAGVETTTPSKQSNNKYAASSYLSLTPEQWKSHRSYSCQVTHEGSTVEKTVAPTECPPCSGGGSDIQMTQSPSSLSASVGDRVTITCSASSSVNYMHWFQQKPGKAPKPLIYDTSKLASGVPPKFSGSGSGTDFTLTISSLQPDDFATYYCFQGSGYPYTFGRGTKLEIKGGGGSGGGGSGGGGSGGGGSQVQLLESGAEVKKPGASVKVSCKASGYPFTDYYLHWVRQAPGQGLEWMGWINPYNGDTNYAQKFQGRVTMTRDTSISTAYMELSRLRSDDTAVYYCARLRLLYDTSEYYVMDYWGQGTLVTVSS

SEQ ID NO: 352 - protein, 478 aa, Artificial Sequence
  source: /note="Description of Artificial Sequence: Synthetic 1F3.1-lambda-5T4IM19_VL1-VH4 sequence"
GGSGGSQAVVTQEPSLTVSPGGTVTLTCRSSTGAVTTSNYANWVQQKPGQAPRGLIGGTNKRAPGTPARFSGSLLGGKAALTLSGVQPEDEAEYYCALWYSNLWVFGGGTKLTVLGQPKAAPSVTLFPPSSEELQANKATLVCLISDFYPGAVTVAWKADSSPVKAGVETTTPSKQSNNKYAASSYLSLTPEQWKSHRSYSCQVTHEGSTVEKTVAPTECPPCSGGGSDIQMTQSPSSLSASVGDRVTITCSASSSVNYMHWFQQKPGKAPKPLIYDTSKLASGVPPKFSGSGSGTDFTLTISSLQPDDFATYYCFQGSGYPYTFGRGTKLEIKGGGGSGGGGSGGGGSGGGGSQVQLVQSGAEVKKPGASVKVSCKASGYPFTDYYIHWVRQAPGQGLQWMGWINPYNGDTNFAVKFQGWVTVTRDTSISTVYMGLRGLGSDDTAMYYCARLRLLYDTSEYYVMDYWGPGTTVTVSS

SEQ ID NO: 353 - protein, 478 aa, Artificial Sequence
  source: /note="Description of Artificial Sequence: Synthetic 1F3.1-lambda-5T4IM20_VL1-VH5 sequence"
GGSGGSQAVVTQEPSLTVSPGGTVTLTCRSSTGAVTTSNYANWVQQKPGQAPRGLIGGTNKRAPGTPARFSGSLLGGKAALTLSGVQPEDEAEYYCALWYSNLWVFGGGTKLTVLGQPKAAPSVTLFPPSSEELQANKATLVCLISDFYPGAVTVAWKADSSPVKAGVETTTPSKQSNNKYAASSYLSLTPEQWKSHRSYSCQVTHEGSTVEKTVAPTECPPCSGGGSDIQMTQSPSSLSASVGDRVTITCSASSSVNYMHWFQQKPGKAPKPLIYDTSKLASGVPPKFSGSGSGTDFTLTISSLQPDDFATYYCFQGSGYPYTFGRGTKLEIKGGGGSGGGGSGGGGSGGGGSEVQLVESGGGLVKPGESLRLSCAASGYPFTDYSMNWVRQAPGKGLEWISYINPYNGDIYDADSVKGRFTTSRDNARNSLYLQMNSLTAEDTAVYFCARLRLLYDTSEYYVMDYWGKGDLVTVSS

SEQ ID NO: 354 - protein, 471 aa, Artificial Sequence
  source: /note="Description of Artificial Sequence: Synthetic 1F3.1-lambda-5T4_cl-8_VL-VH sequence"
GGSGGSQAVVTQEPSLTVSPGGTVTLTCRSSTGAVTTSNYANWVQQKPGQAPRGLIGGTNKRAPGTPARFSGSLLGGKAALTLSGVQPEDEAEYYCALWYSNLWVFGGGTKLTVLGQPKAAPSVTLFPPSSEELQANKATLVCLISDFYPGAVTVAWKADSSPVKAGVETTTPSKQSNNKYAASSYLSLTPEQWKSHRSYSCQVTHEGSTVEKTVAPTECPPCSGGGSDIVMTQSQKFMSTTVGDRVSIICKASQNVGTAVAWYQQKPGQSPKVLIYSASNRYTGVPDRFTGSGSGTDFTLTISNMQSEDLADYFCQQYTSYPRTFGGGTKLEIKGGGGSGGGGSGGGGSGGGGSQVQLQQSGAELMKPGASVKLACKATGYTFTAYWIEWVKQRPGHGLEWIGEILPGRGSTNSNEKFKGKATFTADTSSNTVYMQLSSLTTEDSAIFYCARGYRDFDYWGQGTTLTVSS

SEQ ID NO: 355 - protein, 471 aa, Artificial Sequence
  source: /note="Description of Artificial Sequence: Synthetic 1F3.1-lambda-5T4_cl-8_VH-VL sequence"
GGSGGSQAVVTQEPSLTVSPGGTVTLTCRSSTGAVTTSNYANWVQQKPGQAPRGLIGGTNKRAPGTPARFSGSLLGGKAALTLSGVQPEDEAEYYCALWYSNLWVFGGGTKLTVLGQPKAAPSVTLFPPSSEELQANKATLVCLISDFYPGAVTVAWKADSSPVKAGVETTTPSKQSNNKYAASSYLSLTPEQWKSHRSYSCQVTHEGSTVEKTVAPTECPPCSGGGSQVQLQQSGAELMKPGASVKLACKATGYTFTAYWIEWVKQRPGHGLEWIGEILPGRGSTNSNEKFKGKATFTADTSSNTVYMQLSSLTTEDSAIFYCARGYRDFDYWGQGTTLTVSSGGGGSGGGGSGGGGSGGGGSDIVMTQSQKFMSTTVGDRVSIICKASQNVGTAVAWYQQKPGQSPKVLIYSASNRYTGVPDRFTGSGSGTDFTLTISNMQSEDLADYFCQQYTSYPRTFGGGTKLEIK

SEQ ID NO: 356 - protein, 478 aa, Artificial Sequence
  source: /note="Description of Artificial Sequence: Synthetic 1F3.1-lambda-5T4_cl-16_VL-VH sequence"
GGSGGSQAVVTQEPSLTVSPGGTVTLTCRSSTGAVTTSNYANWVQQKPGQAPRGLIGGTNKRAPGTPARFSGSLLGGKAALTLSGVQPEDEAEYYCALWYSNLWVFGGGTKLTVLGQPKAAPSVTLFPPSSEELQANKATLVCLISDFYPGAVTVAWKADSSPVKAGVETTTPSKQSNNKYAASSYLSLTPEQWKSHRSYSCQVTHEGSTVEKTVAPTECPPCSGGGSENVLTQSPAIMSASPGEKVTMTCSASSSVNYMHWYQQKSNTSPKLWIYDTSKLASGVPGRFSGSGSGNSYSLTISSMEAEDVATYFCFQGSGYPYTFGGGTKLEIKGGGGSGGGGSGGGGSGGGGSAVQLQQSGPVRVKPGASVKMSCKASGYPFTDYYMNWVKQSHGRSLDWIGVFNPYNGDTRYTQKFKDKATLTIDKSSSTAYMELNSLTSEDSAVYYCARLRLLYDTSEYYVMDYWGQGTSVTVSS

SEQ ID NO: 357 - protein, 478 aa, Artificial Sequence
  source: /note="Description of Artificial Sequence: Synthetic 1F3.1-lambda-5T4_cl-16_VH-VL sequence"
GGSGGSQAVVTQEPSLTVSPGGTVTLTCRSSTGAVTTSNYANWVQQKPGQAPRGLIGGTNKRAPGTPARFSGSLLGGKAALTLSGVQPEDEAEYYCALWYSNLWVFGGGTKLTVLGQPKAAPSVTLFPPSSEELQANKATLVCLISDFYPGAVTVAWKADSSPVKAGVETTTPSKQSNNKYAASSYLSLTPEQWKSHRSYSCQVTHEGSTVEKTVAPTECPPCSGGGSAVQLQQSGPVRVKPGASVKMSCKASGYPFTDYYMNWVKQSHGRSLDWIGVFNPYNGDTRYTQKFKDKATLTIDKSSSTAYMELNSLTSEDSAVYYCARLRLLYDTSEYYVMDYWGQGTSVTVSSGGGGSGGGGSGGGGSGGGGSENVLTQSPAIMSASPGEKVTMTCSASSSVNYMHWYQQKSNTSPKLWIYDTSKLASGVPGRFSGSGSGNSYSLTISSMEAEDVATYFCFQGSGYPYTFGGGTKLEIK

SEQ ID NO: 358 - protein, 473 aa, Artificial Sequence
  source: /note="Description of Artificial Sequence: Synthetic h1F3.1-lambdaMut3-5T4ScFv(L-H) sequence"
GGSGGSQAVVTQEPSLTVSPGGTVTLTCRSSTGAVTRGNAANWVQQKPGQAPRGLIGGTNARAPGTPARFSGSLLGGKAALTLSGVQPEDEAEYYCALGYSGLWVFGGGTKLTVLGQPKAAPSVTLFPPSSEELQANKATLVCLISDFYPGAVTVAWKADSSPVKAGVETTTPSKQSNNKYAASSYLSLTPEQWKSHRSYSCQVTHEGSTVEKTVAPTECPPCSGGGSDIQMTQSPSSLSASVGDRVTITCRASQGISNYLAWFQQKPGKAPKSLIYRANRLQSGVPSRFSGSGSGTDFTLTISSLQPEDVATYYCLQYDDFPWTFGQGTKLEIKGGGGSGGGGSGGGGSGGGGSQVQLVQSGAEVKKPGASVKVSCKASGYTFTSFWMHWVRQAPGQGLEWMGRIDPNRGGTEYNEKAKSRVTMTADKSTSTAYMELSSLRSEDTAVYYCAGGNPYYPMDYWGQGTTVTVSS

SEQ ID NO: 359 - protein, 473 aa, Artificial Sequence
  source: /note="Description of Artificial Sequence: Synthetic h1F3.1-lambdaMut4-5T4ScFv(L-H) sequence"
GGSGGSQAVVTQEPSLTVSPGGTVTLTCGSSGGGSGGGGSGGWVQQKPGQAPRGLIGGGSGGGSGTPARFSGSLLGGKAALTLSGVQPEDEAEYYCGGGGSGGGGFGGGTKLTVLGQPKAAPSVTLFPPSSEELQANKATLVCLISDFYPGAVTVAWKADSSPVKAGVETTTPSKQSNNKYAASSYLSLTPEQWKSHRSYSCQVTHEGSTVEKTVAPTECPPCSGGGSDIQMTQSPSSLSASVGDRVTITCRASQGISNYLAWFQQKPGKAPKSLIYRANRLQSGVPSRFSGSGSGTDFTLTISSLQPEDVATYYCLQYDDFPWTFGQGTKLEIKGGGGSGGGGSGGGGSGGGGSQVQLVQSGAEVKKPGASVKVSCKASGYTFTSFWMHWVRQAPGQGLEWMGRIDPNRGGTEYNEKAKSRVTMTADKSTSTAYMELSSLRSEDTAVYYCAGGNPYYPMDYWGQGTTVTVSS

SEQ ID NO: 360 - protein, 471 aa, Artificial Sequence
  source: /note="Description of Artificial Sequence: Synthetic 1F3.1-lambda-5T4IM21_VL1-VH6 sequence"
GGSGGSQAVVTQEPSLTVSPGGTVTLTCRSSTGAVTTSNYANWVQQKPGQAPRGLIGGTNKRAPGTPARFSGSLLGGKAALTLSGVQPEDEAEYYCALWYSNLWVFGGGTKLTVLGQPKAAPSVTLFPPSSEELQANKATLVCLISDFYPGAVTVAWKADSSPVKAGVETTTPSKQSNNKYAASSYLSLTPEQWKSHRSYSCQVTHEGSTVEKTVAPTECPPCSGGGSEIVLTQSPATLSLSPGERATLSCKASQNVGTAVAWYQQKPGQAPRLLIYSASNRYTGIPARFSGSGSGTDFTLTISSLEPEDFAVYYCQQYTSYPRTFGGGTKVEIKGGGGSGGGGSGGGGSGGGGSQMQLVQSGSEVKKPGTSGKVSCKSSGYTFTAYAMQWVRQARGQGLEWIGRILPGRGSTNYAQIFRERVTITRNMSTSTSYMQLKSLRSEDTAVYYCAAGYRDFDYWGKGTVVTVSS

SEQ ID NO: 361 - protein, 471 aa, Artificial Sequence
  source: /note="Description of Artificial Sequence: Synthetic 1F3.1-lambda-5T4IM22_VH6-VL1 sequence"
GGSGGSQAVVTQEPSLTVSPGGTVTLTCRSSTGAVTTSNYANWVQQKPGQAPRGLIGGTNKRAPGTPARFSGSLLGGKAALTLSGVQPEDEAEYYCALWYSNLWVFGGGTKLTVLGQPKAAPSVTLFPPSSEELQANKATLVCLISDFYPGAVTVAWKADSSPVKAGVETTTPSKQSNNKYAASSYLSLTPEQWKSHRSYSCQVTHEGSTVEKTVAPTECPPCSGGGSQMQLVQSGSEVKKPGTSGKVSCKSSGYTFTAYAMQWVRQARGQGLEWIGRILPGRGSTNYAQIFRERVTITRNMSTSTSYMQLKSLRSEDTAVYYCAAGYRDFDYWGKGTVVTVSSGGGGSGGGGSGGGGSGGGGSEIVLTQSPATLSLSPGERATLSCKASQNVGTAVAWYQQKPGQAPRLLIYSASNRYTGIPARFSGSGSGTDFTLTISSLEPEDFAVYYCQQYTSYPRTFGGGTKVEIK

SEQ ID NO: 362 - protein, 471 aa, Artificial Sequence
  source: /note="Description of Artificial Sequence: Synthetic 1F3.1-lambda-5T4IM23_VL5-VH7 sequence"
GGSGGSQAVVTQEPSLTVSPGGTVTLTCRSSTGAVTTSNYANWVQQKPGQAPRGLIGGTNKRAPGTPARFSGSLLGGKAALTLSGVQPEDEAEYYCALWYSNLWVFGGGTKLTVLGQPKAAPSVTLFPPSSEELQANKATLVCLISDFYPGAVTVAWKADSSPVKAGVETTTPSKQSNNKYAASSYLSLTPEQWKSHRSYSCQVTHEGSTVEKTVAPTECPPCSGGGSELVLTQSPATLSLSPGERATLSCKASQNVGTAVAWYQQKPGQAPRLLIYSASNRYTGIPARFSGSGSGTDFTLTVSSLEPEDFAVYYCQQYTSYPRTFGQGTKVEIKGGGGSGGGGSGGGGSGGGGSQVQLVQSGAEVKKPGASVKLTCTASGYTFTAYYMHWMRQAPGQGLEWMGIVLPGRGSTNYAQKFQGRVTVTRDTSTNTVYMELNSLTSEDTAVYYCVRGYRDFDYWGPGTLVTVSS

SEQ ID NO: 363 - protein, 471 aa, Artificial Sequence
  source: /note="Description of Artificial Sequence: Synthetic 1F3.1-lambda-5T4IM24_VH7-VL5 sequence"
GGSGGSQAVVTQEPSLTVSPGGTVTLTCRSSTGAVTTSNYANWVQQKPGQAPRGLIGGTNKRAPGTPARFSGSLLGGKAALTLSGVQPEDEAEYYCALWYSNLWVFGGGTKLTVLGQPKAAPSVTLFPPSSEELQANKATLVCLISDFYPGAVTVAWKADSSPVKAGVETTTPSKQSNNKYAASSYLSLTPEQWKSHRSYSCQVTHEGSTVEKTVAPTECPPCSGGGSQVQLVQSGAEVKKPGASVKLTCTASGYTFTAYYMHWMRQAPGQGLEWMGIVLPGRGSTNYAQKFQGRVTVTRDTSTNTVYMELNSLTSEDTAVYYCVRGYRDFDYWGPGTLVTVSSGGGGSGGGGSGGGGSGGGGSELVLTQSPATLSLSPGERATLSCKASQNVGTAVAWYQQKPGQAPRLLIYSASNRYTGIPARFSGSGSGTDFTLTVSSLEPEDFAVYYCQQYTSYPRTFGQGTKVEIK

SEQ ID NO: 364 - protein, 478 aa, Artificial Sequence
  source: /note="Description of Artificial Sequence: Synthetic 1F3.1-lambda-5T4IM25_VL3-VH2 sequence"
GGSGGSQAVVTQEPSLTVSPGGTVTLTCRSSTGAVTTSNYANWVQQKPGQAPRGLIGGTNKRAPGTPARFSGSLLGGKAALTLSGVQPEDEAEYYCALWYSNLWVFGGGTKLTVLGQPKAAPSVTLFPPSSEELQANKATLVCLISDFYPGAVTVAWKADSSPVKAGVETTTPSKQSNNKYAASSYLSLTPEQWKSHRSYSCQVTHEGSTVEKTVAPTECPPCSGGGSDIQMTQSPSRLSASIGDRVTITCSASSSVNYMHWYQQKPRKAPKLLIHDTSKLASDVPSRFSGGASGTEFTLTIDGLQPDDFATYFCFQGSGYPYTFGQGTNVEIQGGGGSGGGGSGGGGSGGGGSQVQLLASGAEVKKPGASVTVSCKASGYPFTDYYLHWVRQAPGQGLEWMGWINPYNGDTNYAPKFHGRVTMTRDTSISTAYMELSRLRSDDTAIYYCARLRLLYDTSEYYVMDYWGQGTTVTVSA

SEQ ID NO: 365 - protein, 478 aa, Artificial Sequence
  source: /note="Description of Artificial Sequence: Synthetic 1F3.1-lambda-5T4IM26_VH2-VL3 sequence"
GGSGGSQAVVTQEPSLTVSPGGTVTLTCRSSTGAVTTSNYANWVQQKPGQAPRGLIGGTNKRAPGTPARFSGSLLGGKAALTLSGVQPEDEAEYYCALWYSNLWVFGGGTKLTVLGQPKAAPSVTLFPPSSEELQANKATLVCLISDFYPGAVTVAWKADSSPVKAGVETTTPSKQSNNKYAASSYLSLTPEQWKSHRSYSCQVTHEGSTVEKTVAPTECPPCSGGGSQVQLLASGAEVKKPGASVTVSCKASGYPFTDYYLHWVRQAPGQGLEWMGWINPYNGDTNYAPKFHGRVTMTRDTSISTAYMELSRLRSDDTAIYYCARLRLLYDTSEYYVMDYWGQGTTVTVSAGGGGSGGGGSGGGGSGGGGSDIQMTQSPSRLSASIGDRVTITCSASSSVNYMHWYQQKPRKAPKLLIHDTSKLASDVPSRFSGGASGTEFTLTIDGLQPDDFATYFCFQGSGYPYTFGQGTNVEIQ

SEQ ID NO: 366 - protein, 478 aa, Artificial Sequence
  source: /note="Description of Artificial Sequence: Synthetic 1F3.1-lambda-5T4IM27_VL1-VH7 sequence"
GGSGGSQAVVTQEPSLTVSPGGTVTLTCRSSTGAVTTSNYANWVQQKPGQAPRGLIGGTNKRAPGTPARFSGSLLGGKAALTLSGVQPEDEAEYYCALWYSNLWVFGGGTKLTVLGQPKAAPSVTLFPPSSEELQANKATLVCLISDFYPGAVTVAWKADSSPVKAGVETTTPSKQSNNKYAASSYLSLTPEQWKSHRSYSCQVTHEGSTVEKTVAPTECPPCSGGGSDIQMTQSPSSLSASVGDRVTITCSASSSVNYMHWFQQKPGKAPKPLIYDTSKLASGVPPKFSGSGSGTDFTLTISSLQPDDFATYYCFQGSGYPYTFGRGTKLEIKGGGGSGGGGSGGGGSGGGGSQVQLVQSGAEVKKPGASVKVSCKASGYPFTDYGISWVRQAPGQRLEWMGWINPYNGDTHYAQRFQGRVAMTTDTSMNTAYLELRSLKSDDAAVYYCVRLRLLYDTSEYYVMDYWGQGTLVTVSS

SEQ ID NO: 367 - protein, 478 aa, Artificial Sequence
  source: /note="Description of Artificial Sequence: Synthetic 1F3.1-lambda-5T4IM28_VH7-VL1 sequence"
GGSGGSQAVVTQEPSLTVSPGGTVTLTCRSSTGAVTTSNYANWVQQKPGQAPRGLIGGTNKRAPGTPARFSGSLLGGKAALTLSGVQPEDEAEYYCALWYSNLWVFGGGTKLTVLGQPKAAPSVTLFPPSSEELQANKATLVCLISDFYPGAVTVAWKADSSPVKAGVETTTPSKQSNNKYAASSYLSLTPEQWKSHRSYSCQVTHEGSTVEKTVAPTECPPCSGGGSQVQLVQSGAEVKKPGASVKVSCKASGYPFTDYGISWVRQAPGQRLEWMGWINPYNGDTHYAQRFQGRVAMTTDTSMNTAYLELRSLKSDDAAVYYCVRLRLLYDTSEYYVMDYWGQGTLVTVSSGGGGSGGGGSGGGGSGGGGSDIQMTQSPSSLSASVGDRVTITCSASSSVNYMHWFQQKPGKAPKPLIYDTSKLASGVPPKFSGSGSGTDFTLTISSLQPDDFATYYCFQGSGYPYTFGRGTKLEIK

SEQ ID NO: 368 - protein, 478 aa, Artificial Sequence
  source: /note="Description of Artificial Sequence: Synthetic 1F3.1-lambda-5T4IM29_hu5T4_cl16-1(BM0) sequence"
GGSGGSQAVVTQEPSLTVSPGGTVTLTCRSSTGAVTTSNYANWVQQKPGQAPRGLIGGTNKRAPGTPARFSGSLLGGKAALTLSGVQPEDEAEYYCALWYSNLWVFGGGTKLTVLGQPKAAPSVTLFPPSSEELQANKATLVCLISDFYPGAVTVAWKADSSPVKAGVETTTPSKQSNNKYAASSYLSLTPEQWKSHRSYSCQVTHEGSTVEKTVAPTECPPCSGGGSEIVLTQSPATLSLSPGERATLSCSASSSVNYMHWYQQKPGQAPRLLIYDTSKLASGIPARFSGSGSGTDFTLTISSLEPEDFAVYYCFQGSGYPYTFGGGTKVEIKGGGGSGGGGSGGGGSGGGGSAVQLVQSGAEVKKPGASVKVSCKASGYTFTDYYMNWVRQAPGQGLEWMGVFNPYNGDTRYTQKFKDRVTMTRDTSTSTVYMELSSLRSEDTAVYYCARLRLLYDTSEYYVMDYWGQGTTVTVSS

SEQ ID NO: 369 - protein, 478 aa, Artificial Sequence
  source: /note="Description of Artificial Sequence: Synthetic 1F3.1-lambda-5T4IM30_hu5T4_cl16-2(BM4) sequence"
GGSGGSQAVVTQEPSLTVSPGGTVTLTCRSSTGAVTTSNYANWVQQKPGQAPRGLIGGTNKRAPGTPARFSGSLLGGKAALTLSGVQPEDEAEYYCALWYSNLWVFGGGTKLTVLGQPKAAPSVTLFPPSSEELQANKATLVCLISDFYPGAVTVAWKADSSPVKAGVETTTPSKQSNNKYAASSYLSLTPEQWKSHRSYSCQVTHEGSTVEKTVAPTECPPCSGGGSEIVLTQSPATLSLSPGERATLSCSASSSVNYMHWYQQKPGQAPRLLIYDTSKLASGIPARFSGSGSGTDFTLTISSLEPEDFAVYYCFQGSGYPYTFGGGTKVEIKGGGGSGGGGSGGGGSGGGGSAVQLVQSGAEVKKPGASVKVSCKASGYTFTDYYMNWVRQAPGQGLEWMGVFNPYNGDTRYTQKFKDKVTMTIDKSTSTVYMELNSLRSEDTAVYYCARLRLLYDTSEYYVMDYWGQGTTVTVSS

SEQ ID NO: 370 - protein, 478 aa, Artificial Sequence
  source: /note="Description of Artificial Sequence: Synthetic 1F3.1-lambda-5T4IM31_hu5T4_cl16-3(BM6) sequence"
GGSGGSQAVVTQEPSLTVSPGGTVTLTCRSSTGAVTTSNYANWVQQKPGQAPRGLIGGTNKRAPGTPARFSGSLLGGKAALTLSGVQPEDEAEYYCALWYSNLWVFGGGTKLTVLGQPKAAPSVTLFPPSSEELQANKATLVCLISDFYPGAVTVAWKADSSPVKAGVETTTPSKQSNNKYAASSYLSLTPEQWKSHRSYSCQVTHEGSTVEKTVAPTECPPCSGGGSEIVLTQSPATLSLSPGERATLSCSASSSVNYMHWYQQKPGQAPRLLIYDTSKLASGIPARFSGSGSGTDFTLTISSLEPEDFAVYYCFQGSGYPYTFGGGTKVEIKGGGGSGGGGSGGGGSGGGGSAVQLVQSGAEVKKPGASVKVSCKASGYTFTDYYMNWVRQAPGRGLEWMGVFNPYNGDTRYTQKFKDKVTLTIDKSTSTVYMELNSLRSEDTAVYYCARLRLLYDTSEYYVMDYWGQGTTVTVSS

SEQ ID NO: 371 - protein, 478 aa, Artificial Sequence
  source: /note="Description of Artificial Sequence: Synthetic 1F3.1-lambda-5T4IM32_hu5T4_cl16-4(BM8) sequence"
GGSGGSQAVVTQEPSLTVSPGGTVTLTCRSSTGAVTTSNYANWVQQKPGQAPRGLIGGTNKRAPGTPARFSGSLLGGKAALTLSGVQPEDEAEYYCALWYSNLWVFGGGTKLTVLGQPKAAPSVTLFPPSSEELQANKATLVCLISDFYPGAVTVAWKADSSPVKAGVETTTPSKQSNNKYAASSYLSLTPEQWKSHRSYSCQVTHEGSTVEKTVAPTECPPCSGGGSEIVLTQSPATLSLSPGERATLSCSASSSVNYMHWYQQKPGQAPRLLIYDTSKLASGIPARFSGSGSGTDFTLTISSLEPEDFAVYYCFQGSGYPYTFGGGTKVEIKGGGGSGGGGSGGGGSGGGGSAVQLVQSGAEVKKPGASVKVSCKASGYTFTDYYMNWVKQAPGRGLEWMGVFNPYNGDTRYTQKFKDKATLTIDKSTSTVYMELNSLRSEDTAVYYCARLRLLYDTSEYYVMDYWGQGTTVTVSS

SEQ ID NO: 372 - protein, 478 aa, Artificial Sequence
  source: /note="Description of Artificial Sequence: Synthetic 1F3.1-lambda-5T4IM33_hu5T4_cl16-5(BM2) sequence"
GGSGGSQAVVTQEPSLTVSPGGTVTLTCRSSTGAVTTSNYANWVQQKPGQAPRGLIGGTNKRAPGTPARFSGSLLGGKAALTLSGVQPEDEAEYYCALWYSNLWVFGGGTKLTVLGQPKAAPSVTLFPPSSEELQANKATLVCLISDFYPGAVTVAWKADSSPVKAGVETTTPSKQSNNKYAASSYLSLTPEQWKSHRSYSCQVTHEGSTVEKTVAPTECPPCSGGGSENVLTQSPATLSLSPGERATLSCSASSSVNYMHWYQQKPGQAPRLLIYDTSKLASGIPARFSGSGSGNDFTLTISSLEPEDFAVYYCFQGSGYPYTFGGGTKVEIKGGGGSGGGGSGGGGSGGGGSAVQLVQSGAEVKKPGASVKVSCKASGYTFTDYYMNWVRQAPGQGLEWMGVFNPYNGDTRYTQKFKDRVTMTRDTSTSTVYMELSSLRSEDTAVYYCARLRLLYDTSEYYVMDYWGQGTTVTVSS

SEQ ID NO: 373 - protein, 478 aa, Artificial Sequence
  source: /note="Description of Artificial Sequence: Synthetic 1F3.1-lambda-5T4IM34_hu5T4_cl16-6(BM6) sequence"
GGSGGSQAVVTQEPSLTVSPGGTVTLTCRSSTGAVTTSNYANWVQQKPGQAPRGLIGGTNKRAPGTPARFSGSLLGGKAALTLSGVQPEDEAEYYCALWYSNLWVFGGGTKLTVLGQPKAAPSVTLFPPSSEELQANKATLVCLISDFYPGAVTVAWKADSSPVKAGVETTTPSKQSNNKYAASSYLSLTPEQWKSHRSYSCQVTHEGSTVEKTVAPTECPPCSGGGSENVLTQSPATLSLSPGERATLSCSASSSVNYMHWYQQKPGQAPRLLIYDTSKLASGIPARFSGSGSGNDFTLTISSLEPEDFAVYYCFQGSGYPYTFGGGTKVEIKGGGGSGGGGSGGGGSGGGGSAVQLVQSGAEVKKPGASVKVSCKASGYTFTDYYMNWVRQAPGQGLEWMGVFNPYNGDTRYTQKFKDKVTMTIDKSTSTVYMELNSLRSEDTAVYYCARLRLLYDTSEYYVMDYWGQGTTVTVSS

SEQ ID NO: 374 - protein, 478 aa, Artificial Sequence
  source: /note="Description of Artificial Sequence: Synthetic 1F3.1-lambda-5T4IM35_hu5T4_cl16-7(BM8) sequence"
GGSGGSQAVVTQEPSLTVSPGGTVTLTCRSSTGAVTTSNYANWVQQKPGQAPRGLIGGTNKRAPGTPARFSGSLLGGKAALTLSGVQPEDEAEYYCALWYSNLWVFGGGTKLTVLGQPKAAPSVTLFPPSSEELQANKATLVCLISDFYPGAVTVAWKADSSPVKAGVETTTPSKQSNNKYAASSYLSLTPEQWKSHRSYSCQVTHEGSTVEKTVAPTECPPCSGGGSENVLTQSPATLSLSPGERATLSCSASSSVNYMHWYQQKPGQAPRLLIYDTSKLASGIPARFSGSGSGNDFTLTISSLEPEDFAVYYCFQGSGYPYTFGGGTKVEIKGGGGSGGGGSGGGGSGGGGSAVQLVQSGAEVKKPGASVKVSCKASGYTFTDYYMNWVRQAPGRGLEWMGVFNPYNGDTRYTQKFKDKVTLTIDKSTSTVYMELNSLRSEDTAVYYCARLRLLYDTSEYYVMDYWGQGTTVTVSS

SEQ ID NO: 375 - protein, 478 aa, Artificial Sequence
  source: /note="Description of Artificial Sequence: Synthetic 1F3.1-lambda-5T4IM36_hu5T4_cl16-8(BM10) sequence"
GGSGGSQAVVTQEPSLTVSPGGTVTLTCRSSTGAVTTSNYANWVQQKPGQAPRGLIGGTNKRAPGTPARFSGSLLGGKAALTLSGVQPEDEAEYYCALWYSNLWVFGGGTKLTVLGQPKAAPSVTLFPPSSEELQANKATLVCLISDFYPGAVTVAWKADSSPVKAGVETTTPSKQSNNKYAASSYLSLTPEQWKSHRSYSCQVTHEGSTVEKTVAPTECPPCSGGGSENVLTQSPATLSLSPGERATLSCSASSSVNYMHWYQQKPGQAPRLLIYDTSKLASGIPARFSGSGSGNDFTLTISSLEPEDFAVYYCFQGSGYPYTFGGGTKVEIKGGGGSGGGGSGGGGSGGGGSAVQLVQSGAEVKKPGASVKVSCKASGYTFTDYYMNWVKQAPGRGLEWMGVFNPYNGDTRYTQKFKDKATLTIDKSTSTVYMELNSLRSEDTAVYYCARLRLLYDTSEYYVMDYWGQGTTVTVSS

SEQ ID NO: 376 - protein, 478 aa, Artificial Sequence
  source: /note="Description of Artificial Sequence: Synthetic 1F3.1-lambda-5T4IM37_hu5T4_cl16-9(BM3) sequence"
GGSGGSQAVVTQEPSLTVSPGGTVTLTCRSSTGAVTTSNYANWVQQKPGQAPRGLIGGTNKRAPGTPARFSGSLLGGKAALTLSGVQPEDEAEYYCALWYSNLWVFGGGTKLTVLGQPKAAPSVTLFPPSSEELQANKATLVCLISDFYPGAVTVAWKADSSPVKAGVETTTPSKQSNNKYAASSYLSLTPEQWKSHRSYSCQVTHEGSTVEKTVAPTECPPCSGGGSENVLTQSPATLSLSPGERATLSCSASSSVNYMHWYQQKPGQSPRLLIYDTSKLASGIPARFSGSGSGNDFTLTISSLEPEDFAVYYCFQGSGYPYTFGGGTKVEIKGGGGSGGGGSGGGGSGGGGSAVQLVQSGAEVKKPGASVKVSCKASGYTFTDYYMNWVRQAPGQGLEWMGVFNPYNGDTRYTQKFKDRVTMTRDTSTSTVYMELSSLRSEDTAVYYCARLRLLYDTSEYYVMDYWGQGTTVTVSS

SEQ ID NO: 377 - protein, 478 aa, Artificial Sequence
  source: /note="Description of Artificial Sequence: Synthetic 1F3.1-lambda-5T4IM38_hu5T4_cl16-10(BM7) sequence"
GGSGGSQAVVTQEPSLTVSPGGTVTLTCRSSTGAVTTSNYANWVQQKPGQAPRGLIGGTNKRAPGTPARFSGSLLGGKAALTLSGVQPEDEAEYYCALWYSNLWVFGGGTKLTVLGQPKAAPSVTLFPPSSEELQANKATLVCLISDFYPGAVTVAWKADSSPVKAGVETTTPSKQSNNKYAASSYLSLTPEQWKSHRSYSCQVTHEGSTVEKTVAPTECPPCSGGGSENVLTQSPATLSLSPGERATLSCSASSSVNYMHWYQQKPGQSPRLLIYDTSKLASGIPARFSGSGSGNDFTLTISSLEPEDFAVYYCFQGSGYPYTFGGGTKVEIKGGGGSGGGGSGGGGSGGGGSAVQLVQSGAEVKKPGASVKVSCKASGYTFTDYYMNWVRQAPGQGLEWMGVFNPYNGDTRYTQKFKDKVTMTIDKSTSTVYMELNSLRSEDTAVYYCARLRLLYDTSEYYVMDYWGQGTTVTVSS

SEQ ID NO: 378 - protein, 478 aa, Artificial Sequence
  source: /note="Description of Artificial Sequence: Synthetic 1F3.1-lambda-5T4IM39_hu5T4_cl16-11(BM9) sequence"
GGSGGSQAVVTQEPSLTVSPGGTVTLTCRSSTGAVTTSNYANWVQQKPGQAPRGLIGGTNKRAPGTPARFSGSLLGGKAALTLSGVQPEDEAEYYCALWYSNLWVFGGGTKLTVLGQPKAAPSVTLFPPSSEELQANKATLVCLISDFYPGAVTVAWKADSSPVKAGVETTTPSKQSNNKYAASSYLSLTPEQWKSHRSYSCQVTHEGSTVEKTVAPTECPPCSGGGSENVLTQSPATLSLSPGERATLSCSASSSVNYMHWYQQKPGQSPRLLIYDTSKLASGIPARFSGSGSGNDFTLTISSLEPEDFAVYYCFQGSGYPYTFGGGTKVEIKGGGGSGGGGSGGGGSGGGGSAVQLVQSGAEVKKPGASVKVSCKASGYTFTDYYMNWVRQAPGRGLEWMGVFNPYNGDTRYTQKFKDKVTLTIDKSTSTVYMELNSLRSEDTAVYYCARLRLLYDTSEYYVMDYWGQGTTVTVSS

SEQ ID NO: 379 - protein, 478 aa, Artificial Sequence
  source: /note="Description of Artificial Sequence: Synthetic 1F3.1-lambda-5T4IM40_hu5T4_cl16-12(BM11) sequence"
GGSGGSQAVVTQEPSLTVSPGGTVTLTCRSSTGAVTTSNYANWVQQKPGQAPRGLIGGTNKRAPGTPARFSGSLLGGKAALTLSGVQPEDEAEYYCALWYSNLWVFGGGTKLTVLGQPKAAPSVTLFPPSSEELQANKATLVCLISDFYPGAVTVAWKADSSPVKAGVETTTPSKQSNNKYAASSYLSLTPEQWKSHRSYSCQVTHEGSTVEKTVAPTECPPCSGGGSENVLTQSPATLSLSPGERATLSCSASSSVNYMHWYQQKPGQSPRLLIYDTSKLASGIPARFSGSGSGNDFTLTISSLEPEDFAVYYCFQGSGYPYTFGGGTKVEIKGGGGSGGGGSGGGGSGGGGSAVQLVQSGAEVKKPGASVKVSCKASGYTFTDYYMNWVKQAPGRGLEWMGVFNPYNGDTRYTQKFKDKATLTIDKSTSTVYMELNSLRSEDTAVYYCARLRLLYDTSEYYVMDYWGQGTTVTVSS

SEQ ID NO: 380 - protein, 478 aa, Artificial Sequence
  source: /note="Description of Artificial Sequence: Synthetic 1F3.1-lambda-5T4IM41_HuCL16-1 (BM0) sequence"
GGSGGSQAVVTQEPSLTVSPGGTVTLTCRSSTGAVTTSNYANWVQQKPGQAPRGLIGGTNKRAPGTPARFSGSLLGGKAALTLSGVQPEDEAEYYCALWYSNLWVFGGGTKLTVLGQPKAAPSVTLFPPSSEELQANKATLVCLISDFYPGAVTVAWKADSSPVKAGVETTTPSKQSNNKYAASSYLSLTPEQWKSHRSYSCQVTHEGSTVEKTVAPTECPPCSGGGSEIVLTQSPATLSLSPGERATLSCSASSSVNYMHWYQQKPGQAPRLLIYDTSKLASGIPARFSGSGSGTDFTLTISSLEPEDFAVYYCFQGSGYPYTFGGGTKVEIKGGGGSGGGGSGGGGSGGGGSQVQLVQSGAEVKKPGASVKVSCKASGYTFTDYYMNWVRQAPGQGLEWMGVFNPYNGDTRYTQKFKDRVTMTRDTSISTAYMELSRLRSDDTAVYYCARLRLLYDTSEYYVMDYWGQGTTVTVSS

SEQ ID NO: 381 - protein, 478 aa, Artificial Sequence
  source: /note="Description of Artificial Sequence: Synthetic 1F3.1-lambda-5T4IM42_HuCL16-2 (BM2) sequence"
GGSGGSQAVVTQEPSLTVSPGGTVTLTCRSSTGAVTTSNYANWVQQKPGQAPRGLIGGTNKRAPGTPARFSGSLLGGKAALTLSGVQPEDEAEYYCALWYSNLWVFGGGTKLTVLGQPKAAPSVTLFPPSSEELQANKATLVCLISDFYPGAVTVAWKADSSPVKAGVETTTPSKQSNNKYAASSYLSLTPEQWKSHRSYSCQVTHEGSTVEKTVAPTECPPCSGGGSEIVLTQSPATLSLSPGERATLSCSASSSVNYMHWYQQKPGQAPRLLIYDTSKLASGIPARFSGSGSGTDFTLTISSLEPEDFAVYYCFQGSGYPYTFGGGTKVEIKGGGGSGGGGSGGGGSGGGGSQVQLVQSGAEVKKPGASVKVSCKASGYTFTDYYMNWVRQAPGQGLEWMGVFNPYNGDTRYTQKFKDRVTMTIDKSISTAYMELSRLRSDDTAVYYCARLRLLYDTSEYYVMDYWGQGTTVTVSS

SEQ ID NO: 382 - protein, 478 aa, Artificial Sequence
  source: /note="Description of Artificial Sequence: Synthetic 1F3.1-lambda-5T4IM43_HuCL16-3 (BM3) sequence"
GGSGGSQAVVTQEPSLTVSPGGTVTLTCRSSTGAVTTSNYANWVQQKPGQAPRGLIGGTNKRAPGTPARFSGSLLGGKAALTLSGVQPEDEAEYYCALWYSNLWVFGGGTKLTVLGQPKAAPSVTLFPPSSEELQANKATLVCLISDFYPGAVTVAWKADSSPVKAGVETTTPSKQSNNKYAASSYLSLTPEQWKSHRSYSCQVTHEGSTVEKTVAPTECPPCSGGGSEIVLTQSPATLSLSPGERATLSCSASSSVNYMHWYQQKPGQAPRLLIYDTSKLASGIPARFSGSGSGTDFTLTISSLEPEDFAVYYCFQGSGYPYTFGGGTKVEIKGGGGSGGGGSGGGGSGGGGSQVQLVQSGAEVKKPGASVKVSCKASGYTFTDYYMNWVRQAPGRGLEWMGVFNPYNGDTRYTQKFKDRVTMTIDKSISTAYMELSRLRSDDTAVYYCARLRLLYDTSEYYVMDYWGQGTTVTVSS

SEQ ID NO: 383 - protein, 478 aa, Artificial Sequence
  source: /note="Description of Artificial Sequence: Synthetic 1F3.1-lambda-5T4IM44_HuCL16-4 (BM6) sequence"
GGSGGSQAVVTQEPSLTVSPGGTVTLTCRSSTGAVTTSNYANWVQQKPGQAPRGLIGGTNKRAPGTPARFSGSLLGGKAALTLSGVQPEDEAEYYCALWYSNLWVFGGGTKLTVLGQPKAAPSVTLFPPSSEELQANKATLVCLISDFYPGAVTVAWKADSSPVKAGVETTTPSKQSNNKYAASSYLSLTPEQWKSHRSYSCQVTHEGSTVEKTVAPTECPPCSGGGSEIVLTQSPATLSLSPGERATLSCSASSSVNYMHWYQQKPGQAPRLLIYDTSKLASGIPARFSGSGSGTDFTLTISSLEPEDFAVYYCFQGSGYPYTFGGGTKVEIKGGGGSGGGGSGGGGSGGGGSQVQLVQSGAEVKKPGASVKVSCKASGYTFTDYYMNWVRQAPGRGLEWIGVFNPYNGDTRYTQKFKDRATLTIDKSISTAYMELSRLRSDDTAVYYCARLRLLYDTSEYYVMDYWGQGTTVTVSS

SEQ ID NO: 384 - protein, 478 aa, Artificial Sequence
  source: /note="Description of Artificial Sequence: Synthetic 1F3.1-lambda-5T4IM45_HuCL16-5 (BM9) sequence"
GGSGGSQAVVTQEPSLTVSPGGTVTLTCRSSTGAVTTSNYANWVQQKPGQAPRGLIGGTNKRAPGTPARFSGSLLGGKAALTLSGVQPEDEAEYYCALWYSNLWVFGGGTKLTVLGQPKAAPSVTLFPPSSEELQANKATLVCLISDFYPGAVTVAWKADSSPVKAGVETTTPSKQSNNKYAASSYLSLTPEQWKSHRSYSCQVTHEGSTVEKTVAPTECPPCSGGGSEIVLTQSPATLSLSPGERATLSCSASSSVNYMHWYQQKPGQAPRLLIYDTSKLASGIPARFSGSGSGTDFTLTISSLEPEDFAVYYCFQGSGYPYTFGGGTKVEIKGGGGSGGGGSGGGGSGGGGSQVQLVQSGAEVKKPGASVKVSCKASGYPFTDYYMNWVRQAPGRGLEWIGVFNPYNGDTRYTQKFKDKATLTIDKSISTAYMELNRLRSDDTAVYYCARLRLLYDTSEYYVMDYWGQGTTVTVSS

SEQ ID NO: 385 - protein, 478 aa, Artificial Sequence
  source: /note="Description of Artificial Sequence: Synthetic 1F3.1-lambda-5T4IM46_HuCL16-6 (BM2) sequence"
GGSGGSQAVVTQEPSLTVSPGGTVTLTCRSSTGAVTTSNYANWVQQKPGQAPRGLIGGTNKRAPGTPARFSGSLLGGKAALTLSGVQPEDEAEYYCALWYSNLWVFGGGTKLTVLGQPKAAPSVTLFPPSSEELQANKATLVCLISDFYPGAVTVAWKADSSPVKAGVETTTPSKQSNNKYAASSYLSLTPEQWKSHRSYSCQVTHEGSTVEKTVAPTECPPCSGGGSENVLTQSPATLSLSPGERATLSCSASSSVNYMHWYQQKPGQAPRLLIYDTSKLASGIPARFSGSGSGTDYTLTISSLEPEDFAVYYCFQGSGYPYTFGGGTKVEIKGGGGSGGGGSGGGGSGGGGSQVQLVQSGAEVKKPGASVKVSCKASGYTFTDYYMNWVRQAPGQGLEWMGVFNPYNGDTRYTQKFKDRVTMTRDTSISTAYMELSRLRSDDTAVYYCARLRLLYDTSEYYVMDYWGQGTTVTVSS

SEQ ID NO: 386 - protein, 478 aa, Artificial Sequence
  source: /note="Description of Artificial Sequence: Synthetic 1F3.1-lambda-5T4IM47_HuCL16-7 (BM4) sequence"
GGSGGSQAVVTQEPSLTVSPGGTVTLTCRSSTGAVTTSNYANWVQQKPGQAPRGLIGGTNKRAPGTPARFSGSLLGGKAALTLSGVQPEDEAEYYCALWYSNLWVFGGGTKLTVLGQPKAAPSVTLFPPSSEELQANKATLVCLISDFYPGAVTVAWKADSSPVKAGVETTTPSKQSNNKYAASSYLSLTPEQWKSHRSYSCQVTHEGSTVEKTVAPTECPPCSGGGSENVLTQSPATLSLSPGERATLSCSASSSVNYMHWYQQKPGQAPRLLIYDTSKLASGIPARFSGSGSGTDYTLTISSLEPEDFAVYYCFQGSGYPYTFGGGTKVEIKGGGGSGGGGSGGGGSGGGGSQVQLVQSGAEVKKPGASVKVSCKASGYTFTDYYMNWVRQAPGQGLEWMGVFNPYNGDTRYTQKFKDRVTMTIDKSISTAYMELSRLRSDDTAVYYCARLRLLYDTSEYYVMDYWGQGTTVTVSS

SEQ ID NO: 387 - protein, 478 aa, Artificial Sequence
  source: /note="Description of Artificial Sequence: Synthetic 1F3.1-lambda-5T4IM48_HuCL16-8 (BM5) sequence"
GGSGGSQAVVTQEPSLTVSPGGTVTLTCRSSTGAVTTSNYANWVQQKPGQAPRGLIGGTNKRAPGTPARFSGSLLGGKAALTLSGVQPEDEAEYYCALWYSNLWVFGGGTKLTVLGQPKAAPSVTLFPPSSEELQANKATLVCLISDFYPGAVTVAWKADSSPVKAGVETTTPSKQSNNKYAASSYLSLTPEQWKSHRSYSCQVTHEGSTVEKTVAPTECPPCSGGGSENVLTQSPATLSLSPGERATLSCSASSSVNYMHWYQQKPGQAPRLLIYDTSKLASGIPARFSGSGSGTDYTLTISSLEPEDFAVYYCFQGSGYPYTFGGGTKVEIKGGGGSGGGGSGGGGSGGGGSQVQLVQSGAEVKKPGASVKVSCKASGYTFTDYYMNWVRQAPGRGLEWMGVFNPYNGDTRYTQKFKDRVTMTIDKSISTAYMELSRLRSDDTAVYYCARLRLLYDTSEYYVMDYWGQGTTVTVSS

SEQ ID NO: 388 - protein, 478 aa, Artificial Sequence
  source: /note="Description of Artificial Sequence: Synthetic 1F3.1-lambda-5T4IM49_HuCL16-9 (BM8) sequence"
GGSGGSQAVVTQEPSLTVSPGGTVTLTCRSSTGAVTTSNYANWVQQKPGQAPRGLIGGTNKRAPGTPARFSGSLLGGKAALTLSGVQPEDEAEYYCALWYSNLWVFGGGTKLTVLGQPKAAPSVTLFPPSSEELQANKATLVCLISDFYPGAVTVAWKADSSPVKAGVETTTPSKQSNNKYAASSYLSLTPEQWKSHRSYSCQVTHEGSTVEKTVAPTECPPCSGGGSENVLTQSPATLSLSPGERATLSCSASSSVNYMHWYQQKPGQAPRLLIYDTSKLASGIPARFSGSGSGTDYTLTISSLEPEDFAVYYCFQGSGYPYTFGGGTKVEIKGGGGSGGGGSGGGGSGGGGSQVQLVQSGAEVKKPGASVKVSCKASGYTFTDYYMNWVRQAPGRGLEWIGVFNPYNGDTRYTQKFKDRATLTIDKSISTAYMELSRLRSDDTAVYYCARLRLLYDTSEYYVMDYWGQGTTVTVSS

SEQ ID NO: 389 - protein, 478 aa, Artificial Sequence
  source: /note="Description of Artificial Sequence: Synthetic 1F3.1-lambda-5T4IM50_HuCL16-10 (BM11) sequence"
GGSGGSQAVVTQEPSLTVSPGGTVTLTCRSSTGAVTTSNYANWVQQKPGQAPRGLIGGTNKRAPGTPARFSGSLLGGKAALTLSGVQPEDEAEYYCALWYSNLWVFGGGTKLTVLGQPKAAPSVTLFPPSSEELQANKATLVCLISDFYPGAVTVAWKADSSPVKAGVETTTPSKQSNNKYAASSYLSLTPEQWKSHRSYSCQVTHEGSTVEKTVAPTECPPCSGGGSENVLTQSPATLSLSPGERATLSCSASSSVNYMHWYQQKPGQAPRLLIYDTSKLASGIPARFSGSGSGTDYTLTISSLEPEDFAVYYCFQGSGYPYTFGGGTKVEIKGGGGSGGGGSGGGGSGGGGSQVQLVQSGAEVKKPGASVKVSCKASGYPFTDYYMNWVRQAPGRGLEWIGVFNPYNGDTRYTQKFKDKATLTIDKSISTAYMELNRLRSDDTAVYYCARLRLLYDTSEYYVMDYWGQGTTVTVSS

SEQ ID NO: 390 - protein, 478 aa, Artificial Sequence
  source: /note="Description of Artificial Sequence: Synthetic 1F3.1-lambda-5T4IM51_HuCL16-11 (BM4) sequence"
GGSGGSQAVVTQEPSLTVSPGGTVTLTCRSSTGAVTTSNYANWVQQKPGQAPRGLIGGTNKRAPGTPARFSGSLLGGKAALTLSGVQPEDEAEYYCALWYSNLWVFGGGTKLTVLGQPKAAPSVTLFPPSSEELQANKATLVCLISDFYPGAVTVAWKADSSPVKAGVETTTPSKQSNNKYAASSYLSLTPEQWKSHRSYSCQVTHEGSTVEKTVAPTECPPCSGGGSENVLTQSPATLSLSPGERATLSCSASSSVNYMHWYQQKPGQSPRLLIYDTSKLASGIPARFSGSGSGTDYTLTISSLEPEDFAVYFCFQGSGYPYTFGGGTKVEIKGGGGSGGGGSGGGGSGGGGSQVQLVQSGAEVKKPGASVKVSCKASGYTFTDYYMNWVRQAPGQGLEWMGVFNPYNGDTRYTQKFKDRVTMTRDTSISTAYMELSRLRSDDTAVYYCARLRLLYDTSEYYVMDYWGQGTTVTVSS

SEQ ID NO: 391 - protein, 478 aa, Artificial Sequence
  source: /note="Description of Artificial Sequence: Synthetic 1F3.1-lambda-5T4IM52_HuCL16-12 (BM6) sequence"
GGSGGSQAVVTQEPSLTVSPGGTVTLTCRSSTGAVTTSNYANWVQQKPGQAPRGLIGGTNKRAPGTPARFSGSLLGGKAALTLSGVQPEDEAEYYCALWYSNLWVFGGGTKLTVLGQPKAAPSVTLFPPSSEELQANKATLVCLISDFYPGAVTVAWKADSSPVKAGVETTTPSKQSNNKYAASSYLSLTPEQWKSHRSYSCQVTHEGSTVEKTVAPTECPPCSGGGSENVLTQSPATLSLSPGERATLSCSASSSVNYMHWYQQKPGQSPRLLIYDTSKLASGIPARFSGSGSGTDYTLTISSLEPEDFAVYFCFQGSGYPYTFGGGTKVEIKGGGGSGGGGSGGGGSGGGGSQVQLVQSGAEVKKPGASVKVSCKASGYTFTDYYMNWVRQAPGQGLEWMGVFNPYNGDTRYTQKFKDRVTMTIDKSISTAYMELSRLRSDDTAVYYCARLRLLYDTSEYYVMDYWGQGTTVTVSS

SEQ ID NO: 392 - protein, 478 aa, Artificial Sequence
  source: /note="Description of Artificial Sequence: Synthetic 1F3.1-lambda-5T4IM53_HuCL16-13 (BM7) sequence"
GGSGGSQAVVTQEPSLTVSPGGTVTLTCRSSTGAVTTSNYANWVQQKPGQAPRGLIGGTNKRAPGTPARFSGSLLGGKAALTLSGVQPEDEAEYYCALWYSNLWVFGGGTKLTVLGQPKAAPSVTLFPPSSEELQANKATLVCLISDFYPGAVTVAWKADSSPVKAGVETTTPSKQSNNKYAASSYLSLTPEQWKSHRSYSCQVTHEGSTVEKTVAPTECPPCSGGGSENVLTQSPATLSLSPGERATLSCSASSSVNYMHWYQQKPGQSPRLLIYDTSKLASGIPARFSGSGSGTDYTLTISSLEPEDFAVYFCFQGSGYPYTFGGGTKVEIKGGGGSGGGGSGGGGSGGGGSQVQLVQSGAEVKKPGASVKVSCKASGYTFTDYYMNWVRQAPGRGLEWMGVFNPYNGDTRYTQKFKDRVTMTIDKSISTAYMELSRLRSDDTAVYYCARLRLLYDTSEYYVMDYWGQGTTVTVSS

SEQ ID NO: 393 - protein, 478 aa, Artificial Sequence
  source: /note="Description of Artificial Sequence: Synthetic 1F3.1-lambda-5T4IM54_HuCL16-14 (BM10) sequence"
GGSGGSQAVVTQEPSLTVSPGGTVTLTCRSSTGAVTTSNYANWVQQKPGQAPRGLIGGTNKRAPGTPARFSGSLLGGKAALTLSGVQPEDEAEYYCALWYSNLWVFGGGTKLTVLGQPKAAPSVTLFPPSSEELQANKATLVCLISDFYPGAVTVAWKADSSPVKAGVETTTPSKQSNNKYAASSYLSLTPEQWKSHRSYSCQVTHEGSTVEKTVAPTECPPCSGGGSENVLTQSPATLSLSPGERATLSCSASSSVNYMHWYQQKPGQSPRLLIYDTSKLASGIPARFSGSGSGTDYTLTISSLEPEDFAVYFCFQGSGYPYTFGGGTKVEIKGGGGSGGGGSGGGGSGGGGSQVQLVQSGAEVKKPGASVKVSCKASGYTFTDYYMNWVRQAPGRGLEWIGVFNPYNGDTRYTQKFKDRATLTIDKSISTAYMELSRLRSDDTAVYYCARLRLLYDTSEYYVMDYWGQGTTVTVSS

SEQ ID NO: 394 - protein, 478 aa, Artificial Sequence
  source: /note="Description of Artificial Sequence: Synthetic 1F3.1-lambda-5T4IM55_HuCL16-15 (BM13) sequence"
GGSGGSQAVVTQEPSLTVSPGGTVTLTCRSSTGAVTTSNYANWVQQKPGQAPRGLIGGTNKRAPGTPARFSGSLLGGKAALTLSGVQPEDEAEYYCALWYSNLWVFGGGTKLTVLGQPKAAPSVTLFPPSSEELQANKATLVCLISDFYPGAVTVAWKADSSPVKAGVETTTPSKQSNNKYAASSYLSLTPEQWKSHRSYSCQVTHEGSTVEKTVAPTECPPCSGGGSENVLTQSPATLSLSPGERATLSCSASSSVNYMHWYQQKPGQSPRLLIYDTSKLASGIPARFSGSGSGTDYTLTISSLEPEDFAVYFCFQGSGYPYTFGGGTKVEIKGGGGSGGGGSGGGGSGGGGSQVQLVQSGAEVKKPGASVKVSCKASGYPFTDYYMNWVRQAPGRGLEWIGVFNPYNGDTRYTQKFKDKATLTIDKSISTAYMELNRLRSDDTAVYYCARLRLLYDTSEYYVMDYWGQGTTVTVSS

SEQ ID NO: 395 - protein, 478 aa, Artificial Sequence
  source: /note="Description of Artificial Sequence: Synthetic 1F3.1-lambda-5T4IM56_5T4_CL16 (NG to QG) sequence"
GGSGGSQAVVTQEPSLTVSPGGTVTLTCRSSTGAVTTSNYANWVQQKPGQAPRGLIGGTNKRAPGTPARFSGSLLGGKAALTLSGVQPEDEAEYYCALWYSNLWVFGGGTKLTVLGQPKAAPSVTLFPPSSEELQANKATLVCLISDFYPGAVTVAWKADSSPVKAGVETTTPSKQSNNKYAASSYLSLTPEQWKSHRSYSCQVTHEGSTVEKTVAPTECPPCSGGGSENVLTQSPAIMSASPGEKVTMTCSASSSVNYMHWYQQKSNTSPKLWIYDTSKLASGVPGRFSGSGSGNSYSLTISSMEAEDVATYFCFQGSGYPYTFGGGTKLEIKGGGGSGGGGSGGGGSGGGGSAVQLQQSGPVRVKPGASVKMSCKASGYPFTDYYMNWVKQSHGRSLDWIGVFNPYQGDTRYTQKFKDKATLTIDKSSSTAYMELNSLTSEDSAVYYCARLRLLYDTSEYYVMDYWGQGTSVTVSS

SEQ ID NO: 396 - protein, 478 aa, Artificial Sequence
  source: /note="Description of Artificial Sequence: Synthetic 1F3.1-lambda-5T4IM57_5T4_CL16 (NG to SG) sequence"
GGSGGSQAVVTQEPSLTVSPGGTVTLTCRSSTGAVTTSNYANWVQQKPGQAPRGLIGGTNKRAPGTPARFSGSLLGGKAALTLSGVQPEDEAEYYCALWYSNLWVFGGGTKLTVLGQPKAAPSVTLFPPSSEELQANKATLVCLISDFYPGAVTVAWKADSSPVKAGVETTTPSKQSNNKYAASSYLSLTPEQWKSHRSYSCQVTHEGSTVEKTVAPTECPPCSGGGSENVLTQSPAIMSASPGEKVTMTCSASSSVNYMHWYQQKSNTSPKLWIYDTSKLASGVPGRFSGSGSGNSYSLTISSMEAEDVATYFCFQGSGYPYTFGGGTKLEIKGGGGSGGGGSGGGGSGGGGSAVQLQQSGPVRVKPGASVKMSCKASGYPFTDYYMNWVKQSHGRSLDWIGVFNPYSGDTRYTQKFKDKATLTIDKSSSTAYMELNSLTSEDSAVYYCARLRLLYDTSEYYVMDYWGQGTSVTVSS

SEQ ID NO: 397 - protein, 478 aa, Artificial Sequence
  source: /note="Description of Artificial Sequence: Synthetic 1F3.1-lambda-5T4IM58_5T4_CL16 (NG to NA) sequence"
GGSGGSQAVVTQEPSLTVSPGGTVTLTCRSSTGAVTTSNYANWVQQKPGQAPRGLIGGTNKRAPGTPARFSGSLLGGKAALTLSGVQPEDEAEYYCALWYSNLWVFGGGTKLTVLGQPKAAPSVTLFPPSSEELQANKATLVCLISDFYPGAVTVAWKADSSPVKAGVETTTPSKQSNNKYAASSYLSLTPEQWKSHRSYSCQVTHEGSTVEKTVAPTECPPCSGGGSENVLTQSPAIMSASPGEKVTMTCSASSSVNYMHWYQQKSNTSPKLWIYDTSKLASGVPGRFSGSGSGNSYSLTISSMEAEDVATYFCFQGSGYPYTFGGGTKLEIKGGGGSGGGGSGGGGSGGGGSAVQLQQSGPVRVKPGASVKMSCKASGYPFTDYYMNWVKQSHGRSLDWIGVFNPYNADTRYTQKFKDKATLTIDKSSSTAYMELNSLTSEDSAVYYCARLRLLYDTSEYYVMDYWGQGTSVTVSS

SEQ ID NO: 398 - protein, 478 aa, Artificial Sequence; identical to SEQ ID NO: 382
  source: /note="Description of Artificial Sequence: Synthetic 1F3.1-lambda-5T4IM53_HuCL16-13 (BM7) sequence"

SEQ ID NO: 399 - protein, 727 aa, Artificial Sequence
  source: /note="Description of Artificial Sequence: Synthetic LC h1F3.1-lambda-bi-NKG2A_Sc(L-H) sequence"
GGSGGSQAVVTQEPSLTVSPGGTVTLTCRSSTGAVTTSNYANWVQQKPGQAPRGLIGGTNKRAPGTPARFSGSLLGGKAALTLSGVQPEDEAEYYCALWYSNLWVFGGGTKLTVLGQPKAAPSVTLFPPSSEELQANKATLVCLISDFYPGAVTVAWKADSSPVKAGVETTTPSKQSNNKYAASSYLSLTPEQWKSHRSYSCQVTHEGSTVEKTVAPTECPPCSGGGSDIQMTQSPSSLSASVGDRVTITCRASENIYSYLAWYQQKPGKAPKLLIYNAKTLAEGVPSRFSGSGSGTDFTLTISSLQPEDFATYYCQHHYGTPRTFGGGTKVEIKGGGGSGGGGSGGGGSQVQLVQSGAEVKKPGASVKVSCKASGYTFTSYWMNWVRQAPGQGLEWMGRIDPYDSETHYAQKLQGRVTMTTDTSTSTAYMELRSLRSDDTAVYYCARGGYDFDVGTLYWFFDVWGQGTTVTVSSGGGGSDIQMTQSPSSLSASVGDRVTITCRASENIYSYLAWYQQKPGKAPKLLIYNAKTLAEGVPSRFSGSGSGTDFTLTISSLQPEDFATYYCQHHYGTPRTFGGGTKVEIKGGGGSGGGGSGGGGSQVQLVQSGAEVKKPGASVKVSCKASGYTFTSYWMNWVRQAPGQGLEWMGRIDPYDSETHYAQKLQGRVTMTTDTSTSTAYMELRSLRSDDTAVYYCARGGYDFDVGTLYWFFDVWGQGTTVTVSS

SEQ ID NO: 400 - DNA, 1422 bp, Artificial Sequence
  source: /note="Description of Artificial Sequence: Synthetic h1F3.1-lambda-ScFv(L-H) sequence"
ggcggcagcggcggctcccaagccgtggtaacccaggagcccagtctgacagtgagccctggcggtacagtgaccttgacttgcaggagcagtaccggagccgtaactacctcaaactacgccaactgggtgcagcagaagcccggtcaggcccccaggggccttattggtgggactaacaaacgagcacccggaacccccgcaaggttcagcggcagccttctgggcggaaaggccgctctcacattgagcggcgtgcagcccgaggacgaggccgagtactactgcgccctgtggtacagcaacctgtgggtgttcggcggagggaccaagctgaccgtgctgggccagcccaaagctgcgccgagcgtgaccctgttccccccgtcaagcgaggagctgcaggctaacaaggccaccctggtgtgcctgattagtgacttctaccccggtgccgtcaccgtggcctggaaggccgacagtagcccagttaaagcgggcgtcgagaccaccactcccagcaagcagagcaacaacaagtacgccgcgagcagctacctgagtctgacccccgagcagtggaagagccacaggagctacagctgccaggtgacccacgagggcagcactgtggagaagactgtggccccgaccgagtgccccccatgtagcggcggagggtccgacatacagatgacccagtcccccagctccctctcagcctctgtgggcgacagggtgaccatcacctgcagagcttcccaaggcatctccaactacctggcctggttccagcagaagccaggcaaggctcctaagagcctgatctacagggctaaccgtctgcagtccggcgtgccctccaggttctctgggtccggcagcggcacagacttcacccttaccatctcctccctgcagcccgaggacgtagccacatattactgcctgcagtacgatgacttcccctggactttcggacagggcaccaagctggagataaagggaggtggtggctcagggggtgggggctccggcggaggggggtctggcggtggcgggtcccaggtgcagctggttcagtctggtgctgaggtgaagaagcctggcgcctcagttaaagtgtcatgcaaggcctccggctacaccttcaccagtttctggatgcactgggtgaggcaggcacccggtcagggcctggagtggatgggccgaatcgatcccaaccgtggcggcactgagtacaacgagaaggccaagagcagggtcacaatgaccgccgacaagtccacctcaactgcttatatggagctgtcctccttgcgttctgaggacactgccgtgtactactgtgcaggcggcaacccctactaccccatggactattgggggcagggtaccactgtcaccgtgtcatcttga

SEQ ID NO: 401 - DNA, 1413 bp, Artificial Sequence
  source: /note="Description of Artificial Sequence: Synthetic 1F3.1-lambda-5T4IM11_VL1-VH1 sequence"
ggcggcagcggcggctcccaagccgtggtaacccaggagcccagtctgacagtgagccctggcggtacagtgaccttgacttgcaggagcagtaccggagccgtaactacctcaaactacgccaactgggtgcagcagaagcccggtcaggcccccaggggccttattggtgggactaacaaacgagcacccggaacccccgcaaggttcagcggcagccttctgggcggaaaggccgctctcacattgagcggcgtgcagcccgaggacgaggccgagtactactgcgccctgtggtacagcaacctgtgggtgttcggcggagggaccaagctgaccgtgctgggccagcccaaagctgcgccgagcgtgaccctgttccccccgtcaagcgaggagctgcaggctaacaaggccaccctggtgtgcctgattagtgacttctaccccggtgccgtcaccgtggcctggaaggccgacagtagcccagttaaagcgggcgtcgagaccaccactcccagcaagcagagcaacaacaagtacgccgcgagcagctacctgagtctgacccccgagcagtggaagagccacaggagctacagctgccaggtgacccacgagggcagcactgtggagaagactgtggccccgaccgagtgccccccatgtagcggcggagggtccgagatcgtgctgacccagtctccagccacactgtctctgtcccccggcgagagagccacactgtcctgcaaggctagccagaacgtgggaaccgctgtggcttggtaccagcagaagccaggacaggctcctaggctgctgatctacagcgcttctaataggtatacaggaatcccagctcggttctccggaagcggatctggcaccgactttaccctgacaatctccagcctggagcctgaggatttcgctgtgtactattgtcagcagtacacctcctatccaaggacatttggcggcggcaccaaggtggagatcaagggcggaggtgggagtggcggcggtggtagcggtggcgggggatccggaggaggggggtcacaggtgctgctggtgcagtccggagctgaggtgaagaagccaggagctagcgtgaaggtgtcttgcaaggcctccggctacaccttcacagcttatcacatccattgggtgaggcaggctccaggacagggactggagtggatgggcatcatcctgcctggcagaggctccaccacatacgctcagaagtttcagggcagagtgaccatgacacgcgacacctctacatccaccgtgtatatggagctgtccagcctgaggagcgaggatgccgctgtgtactattgtgccaggggctaccgggacttcgattattggggccagggcacactggtgaccgtgtctaca

SEQ ID NO: 402 - DNA, 1413 bp, Artificial Sequence
  source: /note="Description of Artificial Sequence: Synthetic 1F3.1-lambda-5T4IM12_VL3-VH1 sequence"
ggcggcagcggcggctcccaagccgtggtaacccaggagcccagtctgacagtgagccctggcggtacagtgaccttgacttgcaggagcagtaccggagccgtaactacctcaaactacgccaactgggtgcagcagaagcccggtcaggcccccaggggccttattggtgggactaacaaacgagcacccggaacccccgcaaggttcagcggcagccttctgggcggaaaggccgctctcacattgagcggcgtgcagcccgaggacgaggccgagtactactgcgccctgtggtacagcaacctgtgggtgttcggcggagggaccaagctgaccgtgctgggccagcccaaagctgcgccgagcgtgaccctgttccccccgtcaagcgaggagctgcaggctaacaaggccaccctggtgtgcctgattagtgacttctaccccggtgccgtcaccgtggcctggaaggccgacagtagcccagttaaagcgggcgtcgagaccaccactcccagcaagcagagcaacaacaagtacgccgcgagcagctacctgagtctgacccccgagcagtggaagagccacaggagctacagctgccaggtgacccacgagggcagcactgtggagaagactgtggccccgaccgagtgccccccatgtagcggcggagggtccgagatcgtgctgacccagtctccagccacactgtctctgtccccaggagagagggctacactgtcctgcaaggctagccagaacgtgggaaccgctgtggcttggtaccagcagaagcccggccagacacctagactgctgatctacagcgcctctaataggtataccggaatcccagctcggttctccggaagcggatctggcacagactttaccctgacaatctccagcctggagcctgaggatttcgctgtgtactattgtcagcagtacacctcctatccaagaacatttggccagggcacccgcctggagatcaagggcggaggtgggagtggcggcggtggtagcggtggcgggggatccggaggaggggggtcacaggtgctgctggtgcagtccggagctgaggtgaagaagccaggagctagcgtgaaggtgtcttgcaaggcctccggctacaccttcacagcttatcacatccattgggtgaggcaggctccaggacagggactggagtggatgggcatcatcctgcctggcagaggctccaccacatacgctcagaagtttcagggcagagtgaccatgacacgcgacacctctacatccaccgtgtatatggagctgtccagcctgaggagcgaggatgccgctgtgtactattgtgccaggggctaccgggacttcgattattggggccagggcacactggtgaccgtgtctaca

SEQ ID NO: 403 - DNA, 1413 bp, Artificial Sequence
  source: /note="Description of Artificial Sequence: Synthetic 1F3.1-lambda-5T4IM13_VL2-VH2 sequence"
ggcggcagcggcggctcccaagccgtggtaacccaggagcccagtctgacagtgagccctggcggtacagtgaccttgacttgcaggagcagtaccggagccgtaactacctcaaactacgccaactgggtgcagcagaagcccggtcaggcccccaggggccttattggtgggactaacaaacgagcacccggaacccccgcaaggttcagcggcagccttctgggcggaaaggccgctctcacattgagcggcgtgcagcccgaggacgaggccgagtactactgcgccctgtggtacagcaacctgtgggtgttcggcggagggaccaagctgaccgtgctgggccagcccaaagctgcgccgagcgtgaccctgttccccccgtcaagcgaggagctgcaggctaacaaggccaccctggtgtgcctgattagtgacttctaccccggtgccgtcaccgtggcctggaaggccgacagtagcccagttaaagcgggcgtcgagaccaccactcccagcaagcagagcaacaacaagtacgccgcgagcagctacctgagtctgacccccgagcagtggaagagccacaggagctacagctgccaggtgacccacgagggcagcactgtggagaagactgtggccccgaccgagtgccccccatgtagcggcggagggtccgagaaagtgatgacccagagcccagctacactgtctgtgtccccaggagagagggctacactgtcctgcaaggctagccagaacgtgggaaccgctgtggcttggtaccagcagagacccggccaggccccttctctgctgatctacagcgcttctaataggtatacaggaatccctgctcggttctccggaagcggatctggcaccgagtttaccctgacaatctccagcctgcagtctgaggacttcgctgtgtactattgtcagcagtacacctcctatccaagaacatttggccagggcacccgcgtggatatcaagggcggaggtgggagtggcggcggtggtagcggtggcgggggatccggaggaggggggtcacaggtgcagctggtgcagtctggcgccgaggtgagaaagccaggagcttccgtgcgcgtgagctgcaaggcttctggctacaccttcacagcttactatatgcactgggtgaggaaggctccaggacagggactggagtggctgggaagaatcctgcctggaaggggatccacaatgtacgctgagaagtttcagggcagggtgaccatgacacgggacaccagcacatctaccgattatatggagctgtccagcctgaggagcgaggacaccgccgtgtactattgtgctaggggctaccgggacttcgattattggggccagggcacactggtgaccgtgtcttcc

SEQ ID NO: 404 - DNA, 1413 bp, Artificial Sequence
  source: /note="Description of Artificial Sequence: Synthetic 1F3.1-lambda-5T4IM14_VL1-VH3 sequence"
ggcggcagcggcggctcccaagccgtggtaacccaggagcccagtctgacagtgagccctggcggtacagtgaccttgacttgcaggagcagtaccggagccgtaactacctcaaactacgccaactgggtgcagcagaagcccggtcaggcccccaggggccttattggtgggactaacaaacgagcacccggaacccccgcaaggttcagcggcagccttctgggcggaaaggccgctctcacattgagcggcgtgcagcccgaggacgaggccgagtactactgcgccctgtggtacagcaacctgtgggtgttcggcggagggaccaagctgaccgtgctgggccagcccaaagctgcgccgagcgtgaccctgttccccccgtcaagcgaggagctgcaggctaacaaggccaccctggtgtgcctgattagtgacttctaccccggtgccgtcaccgtggcctggaaggccgacagtagcccagttaaagcgggcgtcgagaccaccactcccagcaagcagagcaacaacaagtacgccgcgagcagctacctgagtctgacccccgagcagtggaagagccacaggagctacagctgccaggtgacccacgagggcagcactgtggagaagactgtggccccgaccgagtgccccccatgtagcggcggagggtccgagatcgtgctgacccagtctccagccacactgtctctgtcccccggcgagagagccacactgtcctgcaaggctagccagaacgtgggaaccgctgtggcttggtaccagcagaagccaggacaggctcctaggctgctgatctacagcgcttctaataggtatacaggaatcccagctcggttctccggaagcggatctggcaccgactttaccctgacaatctccagcctggagcctgaggatttcgctgtgtactattgtcagcagtacacctcctatccaaggacatttggcggcggcaccaaggtggagatcaagggcggaggtgggagtggcggcggtggtagcggtggcgggggatccggaggaggggggtcacaggtgcagctggtgcagtctggaccagaggtgaagaagcctggagcttccgtgagagtgagctgcagggcttctggctacaccttcacagcttactatatgcactgggtgaggcaggctccaggacagggactggagtgggtgggaaggatcctgccaggaaggggatccacaatgtacgctgagaagtttcagggcagagtgaccctgacacgcgacaccagcacatctaccgactatatggatctgtccagcctgaagagcgacgatacagctatctactattgtaccaggggctaccgggacttcgattattggggccagggcaccacagtgaccgtgtcttcc

SEQ ID NO: 405 - DNA, 1413 bp, Artificial Sequence
  source: /note="Description of Artificial Sequence: Synthetic 1F3.1-lambda-5T4IM15_VL3-VH4 sequence"
ggcggcagcggcggctcccaagccgtggtaacccaggagcccagtctgacagtgagccctggcggtacagtgaccttgacttgcaggagcagtaccggagccgtaactacctcaaactacgccaactgggtgcagcagaagcccggtcaggcccccaggggccttattggtgggactaacaaacgagcacccggaacccccgcaaggttcagcggcagccttctgggcggaaaggccgctctcacattgagcggcgtgcagcccgaggacgaggccgagtactactgcgccctgtggtacagcaacctgtgggtgttcggcggagggaccaagctgaccgtgctgggccagcccaaagctgcgccgagcgtgaccctgttccccccgtcaagcgaggagctgcaggctaacaaggccaccctggtgtgcctgattagtgacttctaccccggtgccgtcaccgtggcctggaaggccgacagtagcccagttaaagcgggcgtcgagaccaccactcccagcaagcagagcaacaacaagtacgccgcgagcagctacctgagtctgacccccgagcagtggaagagccacaggagctacagctgccaggtgacccacgagggcagcactgtggagaagactgtggccccgaccgagtgccccccatgtagcggcggagggtccgagatcgtgctgacccagtctccagccacactgtctctgtccccaggagagagggctacactgtcctgcaaggctagccagaacgtgggaaccgctgtggcttggtaccagcagaagcccggccagacacctagactgctgatctacagcgcctctaataggtataccggaatcccagctcggttctccggaagcggatctggcacagactttaccctgacaatctccagcctggagcctgaggatttcgctgtgtactattgtcagcagtacacctcctatccaagaacatttggccagggcacccgcctggagatcaagggcggaggtgggagtggcggcggtggtagcggtggcgggggatccggaggaggggggtcacagatgcacctggtgcagtccggagctgaggtgaagaagccaggagcttccgtgaaggtgagctgcaagccttctggctacaccttcacagcctactatatccattggctgaggcaggctccaggacagggactggagtgggtgggatggatcctgccaggaagaggatccaccaactacgcccagaagtttcagggcagagtgaccatgacaagagacacctctatctccacagcctatatggagctggctagcctgaggtctgacgatacagccgtgtactattgtgctaggggctaccgggacttcgattattggggccagggcaccctggtgacaatctccagc

SEQ ID NO: 406 - DNA, 1434 bp, Artificial Sequence
  source: /note="Description of Artificial Sequence: Synthetic 1F3.1-lambda-5T4IM16_VL1-VH1 sequence"
ggcggcagcggcggctcccaagccgtggtaacccaggagcccagtctgacagtgagccctggcggtacagtgaccttgacttgcaggagcagtaccggagccgtaactacctcaaactacgccaactgggtgcagcagaagcccggtcaggcccccaggggccttattggtgggactaacaaacgagcacccggaacccccgcaaggttcagcggcagccttctgggcggaaaggccgctctcacattgagcggcgtgcagcccgaggacgaggccgagtactactgcgccctgtggtacagcaacctgtgggtgttcggcggagggaccaagctgaccgtgctgggccagcccaaagctgcgccgagcgtgaccctgttccccccgtcaagcgaggagctgcaggctaacaaggccaccctggtgtgcctgattagtgacttctaccccggtgccgtcaccgtggcctggaaggccgacagtagcccagttaaagcgggcgtcgagaccaccactcccagcaagcagagcaacaacaagtacgccgcgagcagctacctgagtctgacccccgagcagtggaagagccacaggagctacagctgccaggtgacccacgagggcagcactgtggagaagactgtggccccgaccgagtgccccccatgtagcggcggagggtccgacatccagatgacccagtctccatccagcctgagcgcttctgtgggcgatagggtgaccatcacatgctccgcttcttccagcgtgaactacatgcactggttccagcagaagcctggcaaggccccaaagcccctgatctatgacacatccaagctggctagcggagtgccacctaagttctccggaagcggctctggcaccgattttaccctgacaatctcttccctgcagcctgacgatttcgccacatactattgttttcagggctccggctacccatatacctttggccggggcacaaagctggagatcaagggcggaggtgggagtggcggcggtggtagcggtggcgggggatccggaggaggggggtcacaggtgcagctgctggagtctggcgccgaggtgaagaagccaggcgcttccgtgaaggtgagctgcaaggcctctggctaccccttcacagactactatatgcactgggtgaggcaggctccaggacagggactggagtggatgggctggatcaacccttacaatggcgacaccacatatgcccagaagtttcagggcagagtgaccatgacacgcgataccagcacatctaccgtgtatatggaggtgtccagcctgagatccgacgatacagccgtgtactattgtgctaggctgcggctgctgtacgacaccagcgagtactatgtgatggattattggggccagggcacactggtgaccgtgtcttcc

SEQ ID NO: 407 - DNA, 1434 bp, Artificial Sequence
  source: /note="Description of Artificial Sequence: Synthetic 1F3.1-lambda-5T4IM17_VL1-VH2 sequence"
ggcggcagcggcggctcccaagccgtggtaacccaggagcccagtctgacagtgagccctggcggtacagtgaccttgacttgcaggagcagtaccggagccgtaactacctcaaactacgccaactgggtgcagcagaagcccggtcaggcccccaggggccttattggtgggactaacaaacgagcacccggaacccccgcaaggttcagcggcagccttctgggcggaaaggccgctctcacattgagcggcgtgcagcccgaggacgaggccgagtactactgcgccctgtggtacagcaacctgtgggtgttcggcggagggaccaagctgaccgtgctgggccagcccaaagctgcgccgagcgtgaccctgttccccccgtcaagcgaggagctgcaggctaacaaggccaccctggtgtgcctgattagtgacttctaccccggtgccgtcaccgtggcctggaaggccgacagtagcccagttaaagcgggcgtcgagaccaccactcccagcaagcagagcaacaacaagtacgccgcgagcagctacctgagtctgacccccgagcagtggaagagccacaggagctacagctgccaggtgacccacgagggcagcactgtggagaagactgtggccccgaccgagtgccccccatgtagcggcggagggtccgacatccagatgacccagtctccatccagcctgagcgcttctgtgggcgatagggtgaccatcacatgctccgcttcttccagcgtgaactacatgcactggttccagcagaagcctggcaaggccccaaagcccctgatctatgacacatccaagctggctagcggagtgccacctaagttctccggaagcggctctggcaccgattttaccctgacaatctcttccctgcagcctgacgatttcgccacatactattgttttcagggctccggctacccatatacctttggccggggcacaaagctggagatcaagggcggaggtgggagtggcggcggtggtagcggtggcgggggatccggaggaggggggtcacaggtgcagctgctggcttccggagctgaggtgaagaagccaggcgcctctgtgaccgtgtcctgcaaggctagcggctacccattcacagactactatctgcactgggtgaggcaggctccaggacagggactggagtggatgggctggatcaacccctacaatggcgacaccaactatgcccctaagtttcatggcagggtgaccatgacaagagatacctccatcagcacagcttatatggagctgtctaggctgcggtccgacgataccgccatctactattgtgctagactgcgcctgctgtacgacacaagcgagtactatgtgatggattattggggccagggcaccacagtgacagtgtctgct

SEQ ID NO: 408 - DNA, 1434 bp, Artificial Sequence
  source: /note="Description of Artificial Sequence: Synthetic 1F3.1-lambda-5T4IM18_VL1-VH3 sequence"
ggcggcagcggcggctcccaagccgtggtaacccaggagcccagtctgacagtgagccctggcggtacagtgaccttgacttgcaggagcagtaccggagccgtaactacctcaaactacgccaactgggtgcagcagaagcccggtcaggcccccaggggccttattggtgggactaacaaacgagcacccggaacccccgcaaggttcagcggcagccttctgggcggaaaggccgctctcacattgagcggcgtgcagcccgaggacgaggccgagtactactgcgccctgtggtacagcaacctgtgggtgttcggcggagggaccaagctgaccgtgctgggccagcccaaagctgcgccgagcgtgaccctgttccccccgtcaagcgaggagctgcaggctaacaaggccaccctggtgtgcctgattagtgacttctaccccggtgccgtcaccgtggcctggaaggccgacagtagcccagttaaagcgggcgtcgagaccaccactcccagcaagcagagcaacaacaagtacgccgcgagcagctacctgagtctgacccccgagcagtggaagagccacaggagctacagctgccaggtgacccacgagggcagcactgtggagaagactgtggccccgaccgagtgccccccatgtagcggcggagggtccgacatccagatgacccagtctccatccagcctgagcgcttctgtgggcgatagggtgaccatcacatgctccgcttcttccagcgtgaactacatgcactggttccagcagaagcctggcaaggccccaaagcccctgatctatgacacatccaagctggctagcggagtgccacctaagttctccggaagcggctctggcaccgattttaccctgacaatctcttccctgcagcctgacgatttcgccacatactattgttttcagggctccggctacccatatacctttggccggggcacaaagctggagatcaagggcggaggtgggagtggcggcggtggtagcggtggcgggggatccggaggaggggggtcacaggtgcagctgctggagtccggagctgaggtgaagaagccaggagctagcgtgaaggtgtcttgcaaggcctccggctaccccttcaccgactactatctgcactgggtgaggcaggctccaggacagggactggagtggatgggctggatcaacccttacaatggcgacacaaactatgcccagaagtttcagggcagggtgaccatgacaagagatacctctatctccacagcttatatggagctgagcaggctgcggtctgacgataccgccgtgtactattgtgctagactgcgcctgctgtacgacacatccgagtactatgtgatggattattggggccagggcaccctggtgacagtgtccagc

SEQ ID NO: 409 - DNA, 1434 bp, Artificial Sequence
  source: /note="Description of Artificial Sequence: Synthetic 1F3.1-lambda-5T4IM19_VL1-VH4 sequence"
ggcggcagcggcggctcccaagccgtggtaacccaggagcccagtctgacagtgagccctggcggtacagtgaccttgacttgcaggagcagtaccggagccgtaactacctcaaactacgccaactgggtgcagcagaagcccggtcaggcccccaggggccttattggtgggactaacaaacgagcacccggaacccccgcaaggttcagcggcagccttctgggcggaaaggccgctctcacattgagcggcgtgcagcccgaggacgaggccgagtactactgcgccctgtggtacagcaacctgtgggtgttcggcggagggaccaagctgaccgtgctgggccagcccaaagctgcgccgagcgtgaccctgttccccccgtcaagcgaggagctgcaggctaacaaggccaccctggtgtgcctgattagtgacttctaccccggtgccgtcaccgtggcctggaaggccgacagtagcccagttaaagcgggcgtcgagaccaccactcccagcaagcagagcaacaacaagtacgccgcgagcagctacctgagtctgacccccgagcagtggaagagccacaggagctacagctgccaggtgacccacgagggcagcactgtggagaagactgtggccccgaccgagtgccccccatgtagcggcggagggtccgacatccagatgacccagtctccatccagcctgagcgcttctgtgggcgatagggtgaccatcacatgctccgcttcttccagcgtgaactacatgcactggttccagcagaagcctggcaaggccccaaagcccctgatctatgacacatccaagctggctagcggagtgccacctaagttctccggaagcggctctggcaccgattttaccctgacaatctcttccctgcagcctgacgatttcgccacatactattgttttcagggctccggctacccatatacctttggccggggcacaaagctggagatcaagggcggaggtgggagtggcggcggtggtagcggtggcgggggatccggaggaggggggtcacaggtgcagctggtgcagtccggagctgaggtgaagaagccaggagctagcgtgaaggtgtcttgcaaggcctccggctaccccttcaccgactactatatccactgggtgaggcaggctccaggacagggactgcagtggatgggctggatcaacccttacaatggcgacacaaacttcgccgtgaagtttcagggctgggtgaccgtgacaagagatacctctatctccacagtgtatatgggactgaggggactgggaagcgacgataccgccatgtactattgtgctaggctgcggctgctgtacgacacatctgagtactatgtgatggattattggggccccggcaccacagtgaccgtgtccagc

SEQ ID NO: 410 - DNA, 1434 bp, Artificial Sequence
  source: /note="Description of Artificial Sequence: Synthetic 1F3.1-lambda-5T4IM20_VL1-VH5 sequence"
ggcggcagcggcggctcccaagccgtggtaacccaggagcccagtctgacagtgagccctggcggtacagtgaccttgacttgcaggagcagtaccggagccgtaactacctcaaactacgccaactgggtgcagcagaagcccggtcaggcccccaggggccttattggtgggactaacaaacgagcacccggaacccccgcaaggttcagcggcagccttctgggcggaaaggccgctctcacattgagcggcgtgcagcccgaggacgaggccgagtactactgcgccctgtggtacagcaacctgtgggtgttcggcggagggaccaagctgaccgtgctgggccagcccaaagctgcgccgagcgtgaccctgttccccccgtcaagcgaggagctgcaggctaacaaggccaccctggtgtgcctgattagtgacttctaccccggtgccgtcaccgtggcctggaaggccgacagtagcccagttaaagcgggcgtcgagaccaccactcccagcaagcagagcaacaacaagtacgccgcgagcagctacctgagtctgacccccgagcagtggaagagccacaggagctacagctgccaggtgacccacgagggcagcactgtggagaagactgtggccccgaccgagtgccccccatgtagcggcggagggtccgacatccagatgacccagtctccatccagcctgagcgcttctgtgggcgatagggtgaccatcacatgctccgcttcttccagcgtgaactacatgcactggttccagcagaagcctggcaaggccccaaagcccctgatctatgacacatccaagctggctagcggagtgccacctaagttctccggaagcggctctggcaccgattttaccctgacaatctcttccctgcagcctgacgatttcgccacatactattgttttcagggctccggctacccatatacctttggccggggcacaaagctggagatcaagggcggaggtgggagtggcggcggtggtagcggtggcgggggatccggaggaggggggtcagaggtgcagctggtggagagcggaggaggactggtgaagccaggcgagtctctgaggctgtcctgcgctgctagcggataccccttcaccgactattctatgaactgggtgagacaggctccaggcaagggactggagtggatctcttacatcaacccttataatggcgacatctacgacgccgattccgtgaagggcaggttcaccacatctagagataacgctcgcaattccctgtatctgcagatgaatagcctgaccgccgaggacacagctgtgtacttttgtgctaggctgcggctgctgtatgatacctccgagtactatgtgatggactactggggcaagggcgatctggtgacagtgtccagc

SEQ ID NO: 411 - DNA, 1413 bp, Artificial Sequence
  source: /note="Description of Artificial Sequence: Synthetic 1F3.1-lambda-5T4_cl-8_VL-VH sequence"
ggcggcagcggcggctcccaagccgtggtaacccaggagcccagtctgacagtgagccctggcggtacagtgaccttgacttgcaggagcagtaccggagccgtaactacctcaaactacgccaactgggtgcagcagaagcccggtcaggcccccaggggccttattggtgggactaacaaacgagcacccggaacccccgcaaggttcagcggcagccttctgggcggaaaggccgctctcacattgagcggcgtgcagcccgaggacgaggccgagtactactgcgccctgtggtacagcaacctgtgggtgttcggcggagggaccaagctgaccgtgctgggccagcccaaagctgcgccgagcgtgaccctgttccccccgtcaagcgaggagctgcaggctaacaaggccaccctggtgtgcctgattagtgacttctaccccggtgccgtcaccgtggcctggaaggccgacagtagcccagttaaagcgggcgtcgagaccaccactcccagcaagcagagcaacaacaagtacgccgcgagcagctacctgagtctgacccccgagcagtggaagagccacaggagctacagctgccaggtgacccacgagggcagcactgtggagaagactgtggccccgaccgagtgccccccatgtagcggcggagggtccgacattgtgatgacccagtctcaaaaattcatgtccacaacagtaggagacagggtcagcatcatctgcaaggccagtcagaatgtgggtactgctgtagcctggtatcaacagaaaccaggacaatctcctaaagtactgatttactcagcatccaatcgctacactggagtccctgatcgcttcacaggcagtggatctgggacagatttcactctcaccattagcaatatgcagtctgaagacctggcagattatttctgtcagcaatataccagctatcctcggacgttcggtggaggcaccaagctggaaatcaaaggcggaggtgggagtggcggcggtggtagcggtggcgggggatccggaggaggggggtcacaggttcagttgcagcagtctggagctgagctgatgaagcctggggcctcagtgaaacttgcctgcaaggctactggctacacattcactgcctactggatagagtgggtaaagcagaggcctggacatggccttgagtggattggagagattttaccaggcaggggtagtactaactccaatgagaagttcaagggcaaggccacattcactgcagatacatcctccaacacagtctacatgcaactcagcagcctgacaactgaggactctgccatcttttactgtgcaagaggataccgggactttgactactggggccaaggcaccactctcacagtctcctca

SEQ ID NO: 412 - DNA, 1413 bp, Artificial Sequence
  source: /note="Description of Artificial Sequence: Synthetic 1F3.1-lambda-5T4_cl-8_VH-VL sequence"
ggcggcagcggcggctcccaagccgtggtaacccaggagcccagtctgacagtgagccctggcggtacagtgaccttgacttgcaggagcagtaccggagccgtaactacctcaaactacgccaactgggtgcagcagaagcccggtcaggcccccaggggccttattggtgggactaacaaacgagcacccggaacccccgcaaggttcagcggcagccttctgggcggaaaggccgctctcacattgagcggcgtgcagcccgaggacgaggccgagtactactgcgccctgtggtacagcaacctgtgggtgttcggcggagggaccaagctgaccgtgctgggccagcccaaagctgcgccgagcgtgaccctgttccccccgtcaagcgaggagctgcaggctaacaaggccaccctggtgtgcctgattagtgacttctaccccggtgccgtcaccgtggcctggaaggccgacagtagcccagttaaagcgggcgtcgagaccaccactcccagcaagcagagcaacaacaagtacgccgcgagcagctacctgagtctgacccccgagcagtggaagagccacaggagctacagctgccaggtgacccacgagggcagcactgtggagaagactgtggccccgaccgagtgccccccatgtagcggcggagggtcccaggttcagttgcagcagtctggagctgagctgatgaagcctggggcctcagtgaaacttgcctgcaaggctactggctacacattcactgcctactggatagagtgggtaaagcagaggcctggacatggccttgagtggattggagagattttaccaggcaggggtagtactaactccaatgagaagttcaagggcaaggccacattcactgcagatacatcctccaacacagtctacatgcaactcagcagcctgacaactgaggactctgccatcttttactgtgcaagaggataccgggactttgactactggggccaaggcaccactctcacagtctcctcaggcggaggtgggagtggcggcggtggtagcggtggcgggggatccggaggaggggggtcagacattgtgatgacccagtctcaaaaattcatgtccacaacagtaggagacagggtcagcatcatctgcaaggccagtcagaatgtgggtactgctgtagcctggtatcaacagaaaccaggacaatctcctaaagtactgatttactcagcatccaatcgctacactggagtccctgatcgcttcacaggcagtggatctgggacagatttcactctcaccattagcaatatgcagtctgaagacctggcagattatttctgtcagcaatataccagctatcctcggacgttcggtggaggcaccaagctggaaatcaaa

SEQ ID NO: 413 - DNA, 1434 bp, Artificial Sequence
  source: /note="Description of Artificial Sequence: Synthetic 1F3.1-lambda-5T4_cl-16_VL-VH sequence"
ggcggcagcggcggctcccaagccgtggtaacccaggagcccagtctgacagtgagccctggcggtacagtgaccttgacttgcaggagcagtaccggagccgtaactacctcaaactacgccaactgggtgcagcagaagcccggtcaggcccccaggggccttattggtgggactaacaaacgagcacccggaacccccgcaaggttcagcggcagccttctgggcggaaaggccgctctcacattgagcggcgtgcagcccgaggacgaggccgagtactactgcgccctgtggtacagcaacctgtgggtgttcggcggagggaccaagctgaccgtgctgggccagcccaaagctgcgccgagcgtgaccctgttccccccgtcaagcgaggagctgcaggctaacaaggccaccctggtgtgcctgattagtgacttctaccccggtgccgtcaccgtggcctggaaggccgacagtagcccagttaaagcgggcgtcgagaccaccactcccagcaagcagagcaacaacaagtacgccgcgagcagctacctgagtctgacccccgagcagtggaagagccacaggagctacagctgccaggtgacccacgagggcagcactgtggagaagactgtggccccgaccgagtgccccccatgtagcggcggagggtccgaaaatgttctcacccagtctccagcaatcatgtctgcatctccaggggaaaaggtcaccatgacctgcagtgccagctcaagtgtaaattacatgcactggtaccagcagaagtcaaacacctcccccaaactctggatttatgacacatccaaactggcttctggagtcccaggtcgcttcagtggcagtgggtctggaaactcttactctctcacgatcagcagcatggaggctgaagatgttgccacttatttctgttttcaggggagtgggtacccgtacacgttcggaggggggaccaagctggaaataaaaggcggaggtgggagtggcggcggtggtagcggtggcgggggatccggaggaggggggtcagcggtccagctgcaacagtctggacctgtgcgggtgaagcctggggcttcagtgaagatgtcctgtaaggcttctggatacccattcactgactactatatgaactgggtgaagcagagccatgggaggagccttgactggattggagtttttaatccttacaacggtgatactaggtacacccagaagttcaaggacaaggccacattgactattgacaagtcctccagcacagcctacatggagctcaacagcctgacatctgaggactctgcagtctattactgtgcaagattaaggctcctctacgatactagtgagtactatgttatggactactggggtcaaggaacctcagtcaccgtctcttca

SEQ ID NO: 414 - DNA, 1434 bp, Artificial Sequence
  source: /note="Description of Artificial Sequence: Synthetic 1F3.1-lambda-5T4_cl-16_VH-VL sequence"
ggcggcagcggcggctcccaagccgtggtaacccaggagcccagtctgacagtgagccctggcggtacagtgaccttgacttgcaggagcagtaccggagccgtaactacctcaaactacgccaactgggtgcagcagaagcccggtcaggcccccaggggccttattggtgggactaacaaacgagcacccggaacccccgcaaggttcagcggcagccttctgggcggaaaggccgctctcacattgagcggcgtgcagcccgaggacgaggccgagtactactgcgccctgtggtacagcaacctgtgggtgttcggcggagggaccaagctgaccgtgctgggccagcccaaagctgcgccgagcgtgaccctgttccccccgtcaagcgaggagctgcaggctaacaaggccaccctggtgtgcctgattagtgacttctaccccggtgccgtcaccgtggcctggaaggccgacagtagcccagttaaagcgggcgtcgagaccaccactcccagcaagcagagcaacaacaagtacgccgcgagcagctacctgagtctgacccccgagcagtggaagagccacaggagctacagctgccaggtgacccacgagggcagcactgtggagaagactgtggccccgaccgagtgccccccatgtagcggcggagggtccgcggtccagctgcaacagtctggacctgtgcgggtgaagcctggggcttcagtgaagatgtcctgtaaggcttctggatacccattcactgactactatatgaactgggtgaagcagagccatgggaggagccttgactggattggagtttttaatccttacaacggtgatactaggtacacccagaagttcaaggacaaggccacattgactattgacaagtcctccagcacagcctacatggagctcaacagcctgacatctgaggactctgcagtctattactgtgcaagattaaggctcctctacgatactagtgagtactatgttatggactactggggtcaaggaacctcagtcaccgtctcttcaggcggaggtgggagtggcggcggtggtagcggtggcgggggatccggaggaggggggtcagaaaatgttctcacccagtctccagcaatcatgtctgcatctccaggggaaaaggtcaccatgacctgcagtgccagctcaagtgtaaattacatgcactggtaccagcagaagtcaaacacctcccccaaactctggatttatgacacatccaaactggcttctggagtcccaggtcgcttcagtggcagtgggtctggaaactcttactctctcacgatcagcagcatggaggctgaagatgttgccacttatttctgttttcaggggagtgggtacccgtacacgttcggaggggggaccaagctggaaataaaa

SEQ ID NO: 415 - DNA, 1419 bp, Artificial Sequence
  source: /note="Description of Artificial Sequence: Synthetic h1F3.1-lambdaMut3-5T4ScFv(L-H) sequence"
ggcggcagcggcggctcccaagccgtggtaacccaggagcccagtctgacagtgagccctggcggtacagtgaccttgacttgcaggagcagtaccggagccgtaactagaggcaacgccgccaactgggtgcagcagaagcccggtcaggcccccaggggccttattggtgggactaacgcccgagcacccggaacccccgcaaggttcagcggcagccttctgggcggaaaggccgctctcacattgagcggcgtgcagcccgaggacgaggccgagtactactgcgccctgggctacagcggcctgtgggtgttcggcggagggaccaagctgaccgtgctgggccagcccaaagctgcgccgagcgtgaccctgttccccccgtcaagcgaggagctgcaggctaacaaggccaccctggtgtgcctgattagtgacttctaccccggtgccgtcaccgtggcctggaaggccgacagtagcccagttaaagcgggcgtcgagaccaccactcccagcaagcagagcaacaacaagtacgccgcgagcagctacctgagtctgacccccgagcagtggaagagccacaggagctacagctgccaggtgacccacgagggcagcactgtggagaagactgtggccccgaccgagtgccccccatgtagcggcggagggtccgacatacagatgacccagtcccccagctccctctcagcctctgtgggcgacagggtgaccatcacctgcagagcttcccaaggcatctccaactacctggcctggttccagcagaagccaggcaaggctcctaagagcctgatctacagggctaaccgtctgcagtccggcgtgccctccaggttctctgggtccggcagcggcacagacttcacccttaccatctcctccctgcagcccgaggacgtagccacatattactgcctgcagtacgatgacttcccctggactttcggacagggcaccaagctggagataaagggaggtggtggctcagggggtgggggctccggcggaggggggtctggcggtggcgggtcccaggtgcagctggttcagtctggtgctgaggtgaagaagcctggcgcctcagttaaagtgtcatgcaaggcctccggctacaccttcaccagtttctggatgcactgggtgaggcaggcacccggtcagggcctggagtggatgggccgaatcgatcccaaccgtggcggcactgagtacaacgagaaggccaagagcagggtcacaatgaccgccgacaagtccacctcaactgcttatatggagctgtcctccttgcgttctgaggacactgccgtgtactactgtgcaggcggcaacccctactaccccatggactattgggggcagggtaccactgtcaccgtgtcatct

SEQ ID NO: 416 - DNA, 1419 bp, Artificial Sequence
  source: /note="Description of Artificial Sequence: Synthetic h1F3.1-lambdaMut4-5T4ScFv(L-H) sequence"
ggcggcagcggcggcagccaggccgtggtgacccaggagcccagcctgaccgtgagccccggcggcaccgtgaccctgacctgcggcagcagcggcggcggcagcggcggcggcggcagcggcggctgggtgcagcagaagcccggccaggccccccgcggcctgatcggcggcggcagcggcggcggcagcggcacccccgcccgcttcagcggcagcctgctgggcggcaaggccgccctgaccctgagcggcgtgcagcccgaggacgaggccgagtactactgcggcggcggcggcagcggcggcggcggcttcggcggagggaccaagctgaccgtgctgggccagcccaaagctgcgccgagcgtgaccctgttccccccgtcaagcgaggagctgcaggctaacaaggccaccctggtgtgcctgattagtgacttctaccccggtgccgtcaccgtggcctggaaggccgacagtagcccagttaaagcgggcgtcgagaccaccactcccagcaagcagagcaacaacaagtacgccgcgagcagctacctgagtctgacccccgagcagtggaagagccacaggagctacagctgccaggtgacccacgagggcagcactgtggagaagactgtggccccgaccgagtgccccccatgtagcggcggagggtccgacatacagatgacccagtcccccagctccctctcagcctctgtgggcgacagggtgaccatcacctgcagagcttcccaaggcatctccaactacctggcctggttccagcagaagccaggcaaggctcctaagagcctgatctacagggctaaccgtctgcagtccggcgtgccctccaggttctctgggtccggcagcggcacagacttcacccttaccatctcctccctgcagcccgaggacgtagccacatattactgcctgcagtacgatgacttcccctggactttcggacagggcaccaagctggagataaagggaggtggtggctcagggggtgggggctccggcggaggggggtctggcggtggcgggtcccaggtgcagctggttcagtctggtgctgaggtgaagaagcctggcgcctcagttaaagtgtcatgcaaggcctccggctacaccttcaccagtttctggatgcactgggtgaggcaggcacccggtcagggcctggagtggatgggccgaatcgatcccaaccgtggcggcactgagtacaacgagaaggccaagagcagggtcacaatgaccgccgacaagtccacctcaactgcttatatggagctgtcctccttgcgttctgaggacactgccgtgtactactgtgcaggcggcaacccctactaccccatggactattgggggcagggtaccactgtcaccgtgtcatct

SEQ ID NO: 417 - DNA, 1413 bp, Artificial Sequence
  source: /note="Description of Artificial Sequence: Synthetic 1F3.1-lambda-5T4IM21_VL1-VH6 sequence"
ggcggcagcggcggctcccaagccgtggtaacccaggagcccagtctgacagtgagccctggcggtacagtgaccttgacttgcaggagcagtaccggagccgtaactacctcaaactacgccaactgggtgcagcagaagcccggtcaggcccccaggggccttattggtgggactaacaaacgagcacccggaacccccgcaaggttcagcggcagccttctgggcggaaaggccgctctcacattgagcggcgtgcagcccgaggacgaggccgagtactactgcgccctgtggtacagcaacctgtgggtgttcggcggagggaccaagctgaccgtgctgggccagcccaaagctgcgccgagcgtgaccctgttccccccgtcaagcgaggagctgcaggctaacaaggccaccctggtgtgcctgattagtgacttctaccccggtgccgtcaccgtggcctggaaggccgacagtagcccagttaaagcgggcgtcgagaccaccactcccagcaagcagagcaacaacaagtacgccgcgagcagctacctgagtctgacccccgagcagtggaagagccacaggagctacagctgccaggtgacccacgagggcagcactgtggagaagactgtggccccgaccgagtgccccccatgtagcggcggagggtccgaaatcgtgctaactcaaagtccagcaactctgtctctcagccctggcgagagagccacactgtcctgcaaggcctctcagaacgtgggcaccgctgtggcctggtaccagcagaaacccggccaggctccacggctgctgatctactccgcctccaaccggtataccggcatccctgctagattctccggatctggctctggaactgacttcaccctgaccatctccagcctggaacctgaggattttgccgtgtactactgtcaacagtacacctcctaccctagaaccttcggcggcggcaccaaggtcgagatcaagggcggaggtgggagtggcggcggtggtagcggtggcgggggatccggaggaggggggtcacaaatgcaactagtgcaaagtggtagtgaagtcaagaagcccggcacctctggcaaagtgtcctgcaagtcctccggctacacctttaccgcctacgccatgcagtgggtgcggcaagccagaggccagggcctggaatggatcggacggatcctgcctggcagaggatctaccaactacgctcagatcttcagagagagagtgacaatcacccggaacatgtccaccagcacctcctacatgcagctgaagtctctgagatccgaggataccgctgtgtactactgtgccgctggctatcgcgacttcgactactggggcaagggcacagtggtgaccgtgtctagc

SEQ ID NO: 418 - DNA, 1413 bp, Artificial Sequence
  source: /note="Description of Artificial Sequence: Synthetic 1F3.1-lambda-5T4IM22_VH6-VL1 sequence"
ggcggcagcggcggctcccaagccgtggtaacccaggagcccagtctgacagtgagccctggcggtacagtgaccttgacttgcaggagcagtaccggagccgtaactacctcaaactacgccaactgggtgcagcagaagcccggtcaggcccccaggggccttattggtgggactaacaaacgagcacccggaacccccgcaaggttcagcggcagccttctgggcggaaaggccgctctcacattgagcggcgtgcagcccgaggacgaggccgagtactactgcgccctgtggtacagcaacctgtgggtgttcggcggagggaccaagctgaccgtgctgggccagcccaaagctgcgccgagcgtgaccctgttccccccgtcaagcgaggagctgcaggctaacaaggccaccctggtgtgcctgattagtgacttctaccccggtgccgtcaccgtggcctggaaggccgacagtagcccagttaaagcgggcgtcgagaccaccactcccagcaagcagagcaacaacaagtacgccgcgagcagctacctgagtctgacccccgagcagtggaagagccacaggagctacagctgccaggtgacccacgagggcagcactgtggagaagactgtggccccgaccgagtgccccccatgtagcggcggagggtcccaaatgcaactagtgcaaagtggtagtgaagtcaagaagcccggcacctctggcaaagtgtcctgcaagtcctccggctacacctttaccgcctacgccatgcagtgggtgcggcaagccagaggccagggcctggaatggatcggacggatcctgcctggcagaggatctaccaactacgctcagatcttcagagagagagtgacaatcacccggaacatgtccaccagcacctcctacatgcagctgaagtctctgagatccgaggataccgctgtgtactactgtgccgctggctatcgcgacttcgactactggggcaagggcacagtggtgaccgtgtctagcggcggaggtgggagtggcggcggtggtagcggtggcgggggatccggaggaggggggtcagaaatcgtgctaactcaaagtccagcaactctgtctctcagccctggcgagagagccacactgtcctgcaaggcctctcagaacgtgggcaccgctgtggcctggtaccagcagaaacccggccaggctccacggctgctgatctactccgcctccaaccggtataccggcatccctgctagattctccggatctggctctggaactgacttcaccctgaccatctccagcctggaacctgaggattttgccgtgtactactgtcaacagtacacctcctaccctagaaccttcggcggcggcaccaaggtcgagatcaag

SEQ ID NO: 419 - DNA, 1413 bp, Artificial Sequence
  source: /note="Description of Artificial Sequence: Synthetic 1F3.1-lambda-5T4IM23_VL5-VH7 sequence"
ggcggcagcggcggctcccaagccgtggtaacccaggagcccagtctgacagtgagccctggcggtacagtgaccttgacttgcaggagcagtaccggagccgtaactacctcaaactacgccaactgggtgcagcagaagcccggtcaggcccccaggggccttattggtgggactaacaaacgagcacccggaacccccgcaaggttcagcggcagccttctgggcggaaaggccgctctcacattgagcggcgtgcagcccgaggacgaggccgagtactactgcgccctgtggtacagcaacctgtgggtgttcggcggagggaccaagctgaccgtgctgggccagcccaaagctgcgccgagcgtgaccctgttccccccgtcaagcgaggagctgcaggctaacaaggccaccctggtgtgcctgattagtgacttctaccccggtgccgtcaccgtggcctggaaggccgacagtagcccagttaaagcgggcgtcgagaccaccactcccagcaagcagagcaacaacaagtacgccgcgagcagctacctgagtctgacccccgagcagtggaagagccacaggagctacagctgccaggtgacccacgagggcagcactgtggagaagactgtggccccgaccgagtgccccccatgtagcggcggagggtccgaactagtgctaactcaaagtccagcaactctgagcctgtctccaggcgagagagccacactctcctgcaaggcctctcagaacgtgggcaccgctgtggcctggtaccagcagaagcctggccaggctcctagactgctgatctactccgcctccaaccggtataccggcatccctgctagattcagcggctccggatctggcaccgacttcaccctgaccgtgtcctctctggaacctgaggattttgccgtgtactactgtcagcagtacacctcctacccccggaccttcggccaaggaacaaaagtcgagatcaagggcggaggtgggagtggcggcggtggtagcggtggcgggggatccggaggaggggggtcacaagtgcaactagtgcaaagtggtgcagaagtcaaaaagcctggcgcttccgtgaagctgacctgtaccgcttctggctacacctttacagcctactacatgcactggatgcggcaggcccctggacaaggcctggagtggatgggcatcgtgctgcctggaagaggctctaccaactacgcccagaagttccagggcagagtgacagtgaccagagatacctccaccaacaccgtgtacatggaactgaactccctgacatctgaggacaccgccgtgtactactgcgtgcggggctatcgcgacttcgactactggggccccggcaccctggtgaccgtgtccagc

SEQ ID NO: 420 - DNA, 1413 bp, Artificial Sequence
  source: /note="Description of Artificial Sequence: Synthetic 1F3.1-lambda-5T4IM24_VH7-VL5 sequence"
ggcggcagcggcggctcccaagccgtggtaacccaggagcccagtctgacagtgagccctggcggtacagtgaccttgacttgcaggagcagtaccggagccgtaactacctcaaactacgccaactgggtgcagcagaagcccggtcaggcccccaggggccttattggtgggactaacaaacgagcacccggaacccccgcaaggttcagcggcagccttctgggcggaaaggccgctctcacattgagcggcgtgcagcccgaggacgaggccgagtactactgcgccctgtggtacagcaacctgtgggtgttcggcggagggaccaagctgaccgtgctgggccagcccaaagctgcgccgagcgtgaccctgttccccccgtcaagcgaggagctgcaggctaacaaggccaccctggtgtgcctgattagtgacttctaccccggtgccgtcaccgtggcctggaaggccgacagtagcccagttaaagcgggcgtcgagaccaccactcccagcaagcagagcaacaacaagtacgccgcgagcagctacctgagtctgacccccgagcagtggaagagccacaggagctacagctgccaggtgacccacgagggcagcactgtggagaagactgtggccccgaccgagtgccccccatgtagcggcggagggtcccaagtgcaactagtgcaaagtggtgcagaagtcaaaaagcctggcgcttccgtgaagctgacctgtaccgcttctggctacacctttacagcctactacatgcactggatgcggcaggcccctggacaaggcctggagtggatgggcatcgtgctgcctggaagaggctctaccaactacgcccagaagttccagggcagagtgacagtgaccagagatacctccaccaacaccgtgtacatggaactgaactccctgacatctgaggacaccgccgtgtactactgcgtgcggggctatcgcgacttcgactactggggccccggcaccctggtgaccgtgtccagcggcggaggtgggagtggcggcggtggtagcggtggcgggggatccggaggaggggggtcagaactagtgctaactcaaagtccagcaactctgagcctgtctccaggcgagagagccacactctcctgcaaggcctctcagaacgtgggcaccgctgtggcctggtaccagcagaagcctggccaggctcctagactgctgatctactccgcctccaaccggtataccggcatccctgctagattcagcggctccggatctggcaccgacttcaccctgaccgtgtcctctctggaacctgaggattttgccgtgtactactgtcagcagtacacctcctacccccggaccttcggccaaggaacaaaagtcgagatcaag

SEQ ID NO: 421 - DNA, 1434 bp, Artificial Sequence
  source: /note="Description of Artificial Sequence: Synthetic 1F3.1-lambda-5T4IM25_VL3-VH2 sequence"
ggcggcagcggcggctcccaagccgtggtaacccaggagcccagtctgacagtgagccctggcggtacagtgaccttgacttgcaggagcagtaccggagccgtaactacctcaaactacgccaactgggtgcagcagaagcccggtcaggcccccaggggccttattggtgggactaacaaacgagcacccggaacccccgcaaggttcagcggcagccttctgggcggaaaggccgctctcacattgagcggcgtgcagcccgaggacgaggccgagtactactgcgccctgtggtacagcaacctgtgggtgttcggcggagggaccaagctgaccgtgctgggccagcccaaagctgcgccgagcgtgaccctgttccccccgtcaagcgaggagctgcaggctaacaaggccaccctggtgtgcctgattagtgacttctaccccggtgccgtcaccgtggcctggaaggccgacagtagcccagttaaagcgggcgtcgagaccaccactcccagcaagcagagcaacaacaagtacgccgcgagcagctacctgagtctgacccccgagcagtggaagagccacaggagctacagctgccaggtgacccacgagggcagcactgtggagaagactgtggccccgaccgagtgccccccatgtagcggcggagggtccgatatccaaatgactcaaagtccaagtcgactgtctgcttccatcggcgacagagtgacaatcacctgttctgccagctcctccgtgaactacatgcactggtatcagcagaagcctagaaaggccccaaaactgctgatccacgatacatccaagctggcctccgatgtcccttctcggttttccggcggcgctagcggaaccgagttcaccctgaccatcgacggcctgcagcctgacgacttcgccacctacttctgcttccaaggctctggctacccctacaccttcggccagggcaccaacgtggaaatccagggcggaggtgggagtggcggcggtggtagcggtggcgggggatccggaggaggggggtcacaagtgcaactactagcaagtggtgcagaagtgaagaaacccggcgcctccgtgaccgtgtcctgcaaggcctctggctacccattcaccgactactacctgcactgggtgcggcaggctcctggacagggcctcgagtggatgggctggatcaacccttacaacggcgacaccaactacgcccctaagttccacggcagagtgaccatgaccagagatacaagcatctccaccgcctacatggaactgtctcggctgagaagcgacgataccgctatctactattgtgccagactgcggctgctgtacgacacctccgagtactacgtgatggactactggggccagggaaccacagtcaccgtgtctgct

SEQ ID NO: 422 - DNA, 1434 bp, Artificial Sequence
  source: /note="Description of Artificial Sequence: Synthetic 1F3.1-lambda-5T4IM26_VH2-VL3 sequence"
ggcggcagcggcggctcccaagccgtggtaacccaggagcccagtctgacagtgagccctggcggtacagtgaccttgacttgcaggagcagtaccggagccgtaactacctcaaactacgccaactgggtgcagcagaagcccggtcaggcccccaggggccttattggtgggactaacaaacgagcacccggaacccccgcaaggttcagcggcagccttctgggcggaaaggccgctctcacattgagcggcgtgcagcccgaggacgaggccgagtactactgcgccctgtggtacagcaacctgtgggtgttcggcggagggaccaagctgaccgtgctgggccagcccaaagctgcgccgagcgtgaccctgttccccccgtcaagcgaggagctgcaggctaacaaggccaccctggtgtgcctgattagtgacttctaccccggtgccgtcaccgtggcctggaaggccgacagtagcccagttaaagcgggcgtcgagaccaccactcccagcaagcagagcaacaacaagtacgccgcgagcagctacctgagtctgacccccgagcagtggaagagccacaggagctacagctgccaggtgacccacgagggcagcactgtggagaagactgtggccccgaccgagtgccccccatgtagcggcggagggtcccaagtgcaactactagcaagtggtgcagaagtgaagaaacccggcgcctccgtgaccgtgtcctgcaaggcctctggctacccattcaccgactactacctgcactgggtgcggcaggctcctggacagggcctcgagtggatgggctggatcaacccttacaacggcgacaccaactacgcccctaagttccacggcagagtgaccatgaccagagatacaagcatctccaccgcctacatggaactgtctcggctgagaagcgacgataccgctatctactattgtgccagactgcggctgctgtacgacacctccgagtactacgtgatggactactggggccagggaaccacagtcaccgtgtctgctggcggaggtgggagtggcggcggtggtagcggtggcgggggatccggaggaggggggtcagatatccaaatgactcaaagtccaagtcgactgtctgcttccatcggcgacagagtgacaatcacctgttctgccagctcctccgtgaactacatgcactggtatcagcagaagcctagaaaggccccaaaactgctgatccacgatacatccaagctggcctccgatgtcccttctcggttttccggcggcgctagcggaaccgagttcaccctgaccatcgacggcctgcagcctgacgacttcgccacctacttctgcttccaaggctctggctacccctacaccttcggccagggcaccaacgtggaaatccag

SEQ ID NO: 423 - DNA, 1434 bp, Artificial Sequence
  source: /note="Description of Artificial Sequence: Synthetic 1F3.1-lambda-5T4IM27_VL1-VH7 sequence"
ggcggcagcggcggctcccaagccgtggtaacccaggagcccagtctgacagtgagccctggcggtacagtgaccttgacttgcaggagcagtaccggagccgtaactacctcaaactacgccaactgggtgcagcagaagcccggtcaggcccccaggggccttattggtgggactaacaaacgagcacccggaacccccgcaaggttcagcggcagccttctgggcggaaaggccgctctcacattgagcggcgtgcagcccgaggacgaggccgagtactactgcgccctgtggtacagcaacctgtgggtgttcggcggagggaccaagctgaccgtgctgggccagcccaaagctgcgccgagcgtgaccctgttccccccgtcaagcgaggagctgcaggctaacaaggccaccctggtgtgcctgattagtgacttctaccccggtgccgtcaccgtggcctggaaggccgacagtagcccagttaaagcgggcgtcgagaccaccactcccagcaagcagagcaacaacaagtacgccgcgagcagctacctgagtctgacccccgagcagtggaagagccacaggagctacagctgccaggtgacccacgagggcagcactgtggagaagactgtggccccgaccgagtgccccccatgtagcggcggagggtccgatatccaaatgactcaaagtccaagtagtctgtctgcttctgtgggcgaccgggtcacaatcacctgttctgcctccagctccgtgaactacatgcactggttccagcagaagcctggcaaggccccaaaacctctgatctacgacacctccaagctggctagcggcgtgcctcctaagttctccggctccggatctggaacagattttaccctgaccatctcctccctgcagcctgacgacttcgccacctactactgcttccaaggctctggctacccctataccttcggcagaggcaccaagctggagatcaagggcggaggtgggagtggcggcggtggtagcggtggcgggggatccggaggaggggggtcacaagtgcaactagtgcaaagtggtgcagaagtgaagaagcctggcgcttccgtgaaagtgtcctgcaaggcctctggctaccctttcaccgattatggaatctcctgggttagacaggctcctggacagcggctcgagtggatgggctggatcaacccctacaacggcgacacccactacgcccagagattccagggcagagtggccatgaccacagatacctccatgaacaccgcctacctggaactgcggagcctgaagtccgacgacgccgctgtgtactactgtgtgcggctgagactgctgtacgacacctctgagtactacgtgatggactactggggccaaggcaccctggtcacagtgtcttct

SEQ ID NO: 424 - DNA, 1434 bp, Artificial Sequence
  source: /note="Description of Artificial Sequence: Synthetic 1F3.1-lambda-5T4IM28_VH7-VL1 sequence"
ggcggcagcggcggctcccaagccgtggtaacccaggagcccagtctgacagtgagccctggcggtacagtgaccttgacttgcaggagcagtaccggagccgtaactacctcaaactacgccaactgggtgcagcagaagcccggtcaggcccccaggggccttattggtgggactaacaaacgagcacccggaacccccgcaaggttcagcggcagccttctgggcggaaaggccgctctcacattgagcggcgtgcagcccgaggacgaggccgagtactactgcgccctgtggtacagcaacctgtgggtgttcggcggagggaccaagctgaccgtgctgggccagcccaaagctgcgccgagcgtgaccctgttccccccgtcaagcgaggagctgcaggctaacaaggccaccctggtgtgcctgattagtgacttctaccccggtgccgtcaccgtggcctggaaggccgacagtagcccagttaaagcgggcgtcgagaccaccactcccagcaagcagagcaacaacaagtacgccgcgagcagctacctgagtctgacccccgagcagtggaagagccacaggagctacagctgccaggtgacccacgagggcagcactgtggagaagactgtggccccgaccgagtgccccccatgtagcggcggagggtcccaagtgcaactagtgcaaagtggtgcagaagtgaagaagcctggcgcttccgtgaaagtgtcctgcaaggcctctggctaccctttcaccgattatggaatctcctgggttagacaggctcctggacagcggctcgagtggatgggctggatcaacccctacaacggcgacacccactacgcccagagattccagggcagagtggccatgaccacagatacctccatgaacaccgcctacctggaactgcggagcctgaagtccgacgacgccgctgtgtactactgtgtgcggctgagactgctgtacgacacctctgagtactacgtgatggactactggggccaaggcaccctggtcacagtgtcttctggcggaggtgggagtggcggcggtggtagcggtggcgggggatccggaggaggggggtcagatatccaaatgactcaaagtccaagtagtctgtctgcttctgtgggcgaccgggtcacaatcacctgttctgcctccagctccgtgaactacatgcactggttccagcagaagcctggcaaggccccaaaacctctgatctacgacacctccaagctggctagcggcgtgcctcctaagttctccggctccggatctggaacagattttaccctgaccatctcctccctgcagcctgacgacttcgccacctactactgcttccaaggctctggctacccctataccttcggcagaggcaccaagctggagatcaag

SEQ ID NO: 425 - DNA, 1434 bp, Artificial Sequence
  source: /note="Description of Artificial Sequence: Synthetic 1F3.1-lambda-5T4IM29_hu5T4_cl16-1(BM0) sequence"
ggcggcagcggcggctcccaagccgtggtaacccaggagcccagtctgacagtgagccctggcggtacagtgaccttgacttgcaggagcagtaccggagccgtaactacctcaaactacgccaactgggtgcagcagaagcccggtcaggcccccaggggccttattggtgggactaacaaacgagcacccggaacccccgcaaggttcagcggcagccttctgggcggaaaggccgctctcacattgagcggcgtgcagcccgaggacgaggccgagtactactgcgccctgtggtacagcaacctgtgggtgttcggcggagggaccaagctgaccgtgctgggccagcccaaagctgcgccgagcgtgaccctgttccccccgtcaagcgaggagctgcaggctaacaaggccaccctggtgtgcctgattagtgacttctaccccggtgccgtcaccgtggcctggaaggccgacagtagcccagttaaagcgggcgtcgagaccaccactcccagcaagcagagcaacaacaagtacgccgcgagcagctacctgagtctgacccccgagcagtggaagagccacaggagctacagctgccaggtgacccacgagggcagcactgtggagaagactgtggccccgaccgagtgccccccatgtagcggcggagggtccgaaatcgtgctaactcaaagtccagcaactctgtccctgtctccaggcgagagagccaccctcagctgttctgcctcctcttccgtgaactacatgcactggtatcaacagaagcctggccaggctcctcggctgctgatctacgacacctccaagctggcctctggcatccctgctagattctccggctccggaagcggcaccgacttcaccctgaccatctccagcctggaacctgaggattttgccgtgtactactgcttccagggctctggctacccctacaccttcggcggaggcacaaaagtggagatcaagggcggaggtgggagtggcggcggtggtagcggtggcgggggatccggaggaggggggtcagccgtgcaactagtgcaaagtggtgcagaagttaagaagcctggagcctctgtgaaagtgtcttgcaaggcctctggctacaccttcaccgactactacatgaactgggtccggcaggcccctggccaaggcctggagtggatgggcgtgttcaacccctacaacggcgacacccggtacacccagaagtttaaggacagagtgaccatgaccagagatacatccacctccaccgtgtacatggaactgtctagcctgagatccgaggataccgctgtgtactattgtgctagactgcgcctgctgtacgacacatccgagtactacgtgatggactactggggccagggcaccaccgtgacagtgtccagc

SEQ ID NO: 426 - DNA, 1434 bp, Artificial Sequence
  source: /note="Description of Artificial Sequence: Synthetic 1F3.1-lambda-5T4IM30_hu5T4_cl16-2(BM4) sequence"
ggcggcagcggcggctcccaagccgtggtaacccaggagcccagtctgacagtgagccctggcggtacagtgaccttgacttgcaggagcagtaccggagccgtaactacctcaaactacgccaactgggtgcagcagaagcccggtcaggcccccaggggccttattggtgggactaacaaacgagcacccggaacccccgcaaggttcagcggcagccttctgggcggaaaggccgctctcacattgagcggcgtgcagcccgaggacgaggccgagtactactgcgccctgtggtacagcaacctgtgggtgttcggcggagggaccaagctgaccgtgctgggccagcccaaagctgcgccgagcgtgaccctgttccccccgtcaagcgaggagctgcaggctaacaaggccaccctggtgtgcctgattagtgacttctaccccggtgccgtcaccgtggcctggaaggccgacagtagcccagttaaagcgggcgtcgagaccaccactcccagcaagcagagcaacaacaagtacgccgcgagcagctacctgagtctgacccccgagcagtggaagagccacaggagctacagctgccaggtgacccacgagggcagcactgtggagaagactgtggccccgaccgagtgccccccatgtagcggcggagggtccgaaatcgtgctaactcaaagtccagcaactctgtccctgtctccaggcgagagagccaccctcagctgttctgcctcctcttccgtgaactacatgcactggtatcaacagaagcctggccaggctcctcggctgctgatctacgacacctccaagctggcctctggcatccctgctagattctccggctccggaagcggcaccgacttcaccctgaccatctccagcctggaacctgaggattttgccgtgtactactgcttccagggctctggctacccctacaccttcggcggaggcacaaaagtggagatcaagggcggaggtgggagtggcggcggtggtagcggtggcgggggatccggaggaggggggtcagccgtgcaactagtgcaaagtggtgcagaagttaagaagcctggagcctctgtgaaagtgtcttgcaaggcctctggctacaccttcaccgactactacatgaactgggtccggcaggcccctggccaaggcctggagtggatgggcgtgttcaacccctacaacggcgacacccggtacacccagaagtttaaggacaaggtgaccatgaccatcgataagtccacctccaccgtgtacatggaactgaacagcctgagatccgaggataccgctgtgtactattgtgctagactgcgcctgctgtacgacacatccgagtactacgtgatggactactggggccagggcaccaccgtgacagtgtccagc

SEQ ID NO: 427 - DNA, 1434 bp, Artificial Sequence
  source: /note="Description of Artificial Sequence: Synthetic 1F3.1-lambda-5T4IM31_hu5T4_cl16-3(BM6) sequence"
ggcggcagcggcggctcccaagccgtggtaacccaggagcccagtctgacagtgagccctggcggtacagtgaccttgacttgcaggagcagtaccggagccgtaactacctcaaactacgccaactgggtgcagcagaagcccggtcaggcccccaggggccttattggtgggactaacaaacgagcacccggaacccccgcaaggttcagcggcagccttctgggcggaaaggccgctctcacattgagcggcgtgcagcccgaggacgaggccgagtactactgcgccctgtggtacagcaacctgtgggtgttcggcggagggaccaagctgaccgtgctgggccagcccaaagctgcgccgagcgtgaccctgttccccccgtcaagcgaggagctgcaggctaacaaggccaccctggtgtgcctgattagtgacttctaccccggtgccgtcaccgtggcctggaaggccgacagtagcccagttaaagcgggcgtcgagaccaccactcccagcaagcagagcaacaacaagtacgccgcgagcagctacctgagtctgacccccgagcagtggaagagccacaggagctacagctgccaggtgacccacgagggcagcactgtggagaagactgtggccccgaccgagtgccccccatgtagcggcggagggtccgaaatcgtgctaactcaaagtccagcaactctgtccctgtctccaggcgagagagccaccctcagctgttctgcctcctcttccgtgaactacatgcactggtatcaacagaagcctggccaggctcctcggctgctgatctacgacacctccaagctggcctctggcatccctgctagattctccggctccggaagcggcaccgacttcaccctgaccatctccagcctggaacctgaggattttgccgtgtactactgcttccagggctctggctacccctacaccttcggcggaggcacaaaagtggagatcaagggcggaggtgggagtggcggcggtggtagcggtggcgggggatccggaggaggggggtcagccgtgcaactagtgcaaagtggtgcagaagttaagaagcctggagcctctgtgaaagtgtcttgcaaggcctctggctacaccttcaccgactactacatgaactgggtccggcaggcccctggccggggcctggagtggatgggcgtgttcaacccctacaacggcgacacccggtacacccagaagtttaaggacaaggtgaccctgaccatcgataagtccacctccaccgtgtacatggaactgaacagcctgagatccgaggataccgctgtgtactattgtgctagactgcgcctgctgtacgacacatccgagtactacgtgatggactactggggccagggcaccaccgtgacagtgtccagc

SEQ ID NO: 428 - DNA, 1434 bp, Artificial Sequence
  source: /note="Description of Artificial Sequence: Synthetic 1F3.1-lambda-5T4IM32_hu5T4_cl16-4(BM8) sequence"
ggcggcagcggcggctcccaagccgtggtaacccaggagcccagtctgacagtgagccctggcggtacagtgaccttgacttgcaggagcagtaccggagccgtaactacctcaaactacgccaactgggtgcagcagaagcccggtcaggcccccaggggccttattggtgggactaacaaacgagcacccggaacccccgcaaggttcagcggcagccttctgggcggaaaggccgctctcacattgagcggcgtgcagcccgaggacgaggccgagtactactgcgccctgtggtacagcaacctgtgggtgttcggcggagggaccaagctgaccgtgctgggccagcccaaagctgcgccgagcgtgaccctgttccccccgtcaagcgaggagctgcaggctaacaaggccaccctggtgtgcctgattagtgacttctaccccggtgccgtcaccgtggcctggaaggccgacagtagcccagttaaagcgggcgtcgagaccaccactcccagcaagcagagcaacaacaagtacgccgcgagcagctacctgagtctgacccccgagcagtggaagagccacaggagctacagctgccaggtgacccacgagggcagcactgtggagaagactgtggccccgaccgagtgccccccatgtagcggcggagggtccgaaatcgtgctaactcaaagtccagcaactctgtccctgtctccaggcgagagagccaccctcagctgttctgcctcctcttccgtgaactacatgcactggtatcaacagaagcctggccaggctcctcggctgctgatctacgacacctccaagctggcctctggcatccctgctagattctccggctccggaagcggcaccgacttcaccctgaccatctccagcctggaacctgaggattttgccgtgtactactgcttccagggctctggctacccctacaccttcggcggaggcacaaaagtggagatcaagggcggaggtgggagtggcggcggtggtagcggtggcgggggatccggaggaggggggtcagccgtgcaactagtgcaaagtggtgcagaagttaagaagcctggagcctctgtgaaagtgtcttgcaaggcctctggctacaccttcaccgactactacatgaactgggtcaagcaggcccctggccggggcctggagtggatgggcgtgttcaacccctacaacggcgacacccggtacacccagaagtttaaggacaaggccaccctgaccatcgataagtccacctccaccgtgtacatggaactgaacagcctgagatccgaggataccgctgtgtactattgtgctagactgcgcctgctgtacgacacatccgagtactacgtgatggactactggggccagggcaccaccgtgacagtgtccagc

SEQ ID NO: 429 - DNA, 1434 bp, Artificial Sequence
  source: /note="Description of Artificial Sequence: Synthetic 1F3.1-lambda-5T4IM33_hu5T4_cl16-5(BM2) sequence"
ggcggcagcggcggctcccaagccgtggtaacccaggagcccagtctgacagtgagccctggcggtacagtgaccttgacttgcaggagcagtaccggagccgtaactacctcaaactacgccaactgggtgcagcagaagcccggtcaggcccccaggggccttattggtgggactaacaaacgagcacccggaacccccgcaaggttcagcggcagccttctgggcggaaaggccgctctcacattgagcggcgtgcagcccgaggacgaggccgagtactactgcgccctgtggtacagcaacctgtgggtgttcggcggagggaccaagctgaccgtgctgggccagcccaaagctgcgccgagcgtgaccctgttccccccgtcaagcgaggagctgcaggctaacaaggccaccctggtgtgcctgattagtgacttctaccccggtgccgtcaccgtggcctggaaggccgacagtagcccagttaaagcgggcgtcgagaccaccactcccagcaagcagagcaacaacaagtacgccgcgagcagctacctgagtctgacccccgagcagtggaagagccacaggagctacagctgccaggtgacccacgagggcagcactgtggagaagactgtggccccgaccgagtgccccccatgtagcggcggagggtccgaaaacgtgctaactcaaagtccagcaactctgtccctgtctccaggcgagagagccaccctcagctgttctgcctcctcttccgtgaactacatgcactggtatcaacagaagcctggccaggctcctcggctgctgatctacgacacctccaagctggcctctggcatccctgctagattctccggctccggaagcggcaacgacttcaccctgaccatctccagcctggaacctgaggattttgccgtgtactactgcttccagggctctggctacccctacaccttcggcggaggcacaaaagtggagatcaagggcggaggtgggagtggcggcggtggtagcggtggcgggggatccggaggaggggggtcagccgtgcaactagtgcaaagtggtgcagaagttaagaagcctggagcctctgtgaaagtgtcttgcaaggcctctggctacaccttcaccgactactacatgaactgggtccggcaggcccctggccaaggcctggagtggatgggcgtgttcaacccctacaacggcgacacccggtacacccagaagtttaaggacagagtgaccatgaccagagatacatccacctccaccgtgtacatggaactgtctagcctgagatccgaggataccgctgtgtactattgtgctagactgcgcctgctgtacgacacatccgagtactacgtgatggactactggggccagggcaccaccgtgacagtgtccagc

SEQ ID NO: 430 - DNA, 1434 bp, Artificial Sequence
  source: /note="Description of Artificial Sequence: Synthetic 1F3.1-lambda-5T4IM34_hu5T4_cl16-6(BM6) sequence"
ggcggcagcggcggctcccaagccgtggtaacccaggagcccagtctgacagtgagccctggcggtacagtgaccttgacttgcaggagcagtaccggagccgtaactacctcaaactacgccaactgggtgcagcagaagcccggtcaggcccccaggggccttattggtgggactaacaaacgagcacccggaacccccgcaaggttcagcggcagccttctgggcggaaaggccgctctcacattgagcggcgtgcagcccgaggacgaggccgagtactactgcgccctgtggtacagcaacctgtgggtgttcggcggagggaccaagctgaccgtgctgggccagcccaaagctgcgccgagcgtgaccctgttccccccgtcaagcgaggagctgcaggctaacaaggccaccctggtgtgcctgattagtgacttctaccccggtgccgtcaccgtggcctggaaggccgacagtagcccagttaaagcgggcgtcgagaccaccactcccagcaagcagagcaacaacaagtacgccgcgagcagctacctgagtctgacccccgagcagtggaagagccacaggagctacagctgccaggtgacccacgagggcagcactgtggagaagactgtggccccgaccgagtgccccccatgtagcggcggagggtccgaaaacgtgctaactcaaagtccagcaactctgtccctgtctccaggcgagagagccaccctcagctgttctgcctcctcttccgtgaactacatgcactggtatcaacagaagcctggccaggctcctcggctgctgatctacgacacctccaagctggcctctggcatccctgctagattctccggctccggaagcggcaacgacttcaccctgaccatctccagcctggaacctgaggattttgccgtgtactactgcttccagggctctggctacccctacaccttcggcggaggcacaaaagtggagatcaagggcggaggtgggagtggcggcggtggtagcggtggcgggggatccggaggaggggggtcagccgtgcaactagtgcaaagtggtgcagaagttaagaagcctggagcctctgtgaaagtgtcttgcaaggcctctggctacaccttcaccgactactacatgaactgggtccggcaggcccctggccaaggcctggagtggatgggcgtgttcaacccctacaacggcgacacccggtacacccagaagtttaaggacaaggtgaccatgaccatcgataagtccacctccaccgtgtacatggaactgaacagcctgagatccgaggataccgctgtgtactattgtgctagactgcgcctgctgtacgacacatccgagtactacgtgatggactactggggccagggcaccaccgtgacagtgtccagc

SEQ ID NO: 431 - DNA, 1434 bp, Artificial Sequence
  source: /note="Description of Artificial Sequence: Synthetic 1F3.1-lambda-5T4IM35_hu5T4_cl16-7(BM8) sequence"
ggcggcagcggcggctcccaagccgtggtaacccaggagcccagtctgacagtgagccctggcggtacagtgaccttgacttgcaggagcagtaccggagccgtaactacctcaaactacgccaactgggtgcagcagaagcccggtcaggcccccaggggccttattggtgggactaacaaacgagcacccggaacccccgcaaggttcagcggcagccttctgggcggaaaggccgctctcacattgagcggcgtgcagcccgaggacgaggccgagtactactgcgccctgtggtacagcaacctgtgggtgttcggcggagggaccaagctgaccgtgctgggccagcccaaagctgcgccgagcgtgaccctgttccccccgtcaagcgaggagctgcaggctaacaaggccaccctggtgtgcctgattagtgacttctaccccggtgccgtcaccgtggcctggaaggccgacagtagcccagttaaagcgggcgtcgagaccaccactcccagcaagcagagcaacaacaagtacgccgcgagcagctacctgagtctgacccccgagcagtggaagagccacaggagctacagctgccaggtgacccacgagggcagcactgtggagaagactgtggccccgaccgagtgccccccatgtagcggcggagggtccgaaaacgtgctaactcaaagtccagcaactctgtccctgtctccaggcgagagagccaccctcagctgttctgcctcctcttccgtgaactacatgcactggtatcaacagaagcctggccaggctcctcggctgctgatctacgacacctccaagctggcctctggcatccctgctagattctccggctccggaagcggcaacgacttcaccctgaccatctccagcctggaacctgaggattttgccgtgtactactgcttccagggctctggctacccctacaccttcggcggaggcacaaaagtggagatcaagggcggaggtgggagtggcggcggtggtagcggtggcgggggatccggaggaggggggtcagccgtgcaactagtgcaaagtggtgcagaagttaagaagcctggagcctctgtgaaagtgtcttgcaaggcctctggctacaccttcaccgactactacatgaactgggtccggcaggcccctggccggggcctggagtggatgggcgtgttcaacccctacaacggcgacacccggtacacccagaagtttaaggacaaggtgaccctgaccatcgataagtccacctccaccgtgtacatggaactgaacagcctgagatccgaggataccgctgtgtactattgtgctagactgcgcctgctgtacgacacatccgagtactacgtgatggactactggggccagggcaccaccgtgacagtgtccagc

SEQ ID NO: 432 - DNA, 1434 bp, Artificial Sequence
  source: /note="Description of Artificial Sequence: Synthetic 1F3.1-lambda-5T4IM36_hu5T4_cl16-8(BM10) sequence"
ggcggcagcggcggctcccaagccgtggtaacccaggagcccagtctgacagtgagccctggcggtacagtgaccttgacttgcaggagcagtaccggagccgtaactacctcaaactacgccaactgggtgcagcagaagcccggtcaggcccccaggggccttattggtgggactaacaaacgagcacccggaacccccgcaaggttcagcggcagccttctgggcggaaaggccgctctcacattgagcggcgtgcagcccgaggacgaggccgagtactactgcgccctgtggtacagcaacctgtgggtgttcggcggagggaccaagctgaccgtgctgggccagcccaaagctgcgccgagcgtgaccctgttccccccgtcaagcgaggagctgcaggctaacaaggccaccctggtgtgcctgattagtgacttctaccccggtgccgtcaccgtggcctggaaggccgacagtagcccagttaaagcgggcgtcgagaccaccactcccagcaagcagagcaacaacaagtacgccgcgagcagctacctgagtctgacccccgagcagtggaagagccacaggagctacagctgccaggtgacccacgagggcagcactgtggagaagactgtggccccgaccgagtgccccccatgtagcggcggagggtccgaaaacgtgctaactcaaagtccagcaactctgtccctgtctccaggcgagagagccaccctcagctgttctgcctcctcttccgtgaactacatgcactggtatcaacagaagcctggccaggctcctcggctgctgatctacgacacctccaagctggcctctggcatccctgctagattctccggctccggaagcggcaacgacttcaccctgaccatctccagcctggaacctgaggattttgccgtgtactactgcttccagggctctggctacccctacaccttcggcggaggcacaaaagtggagatcaagggcggaggtgggagtggcggcggtggtagcggtggcgggggatccggaggaggggggtcagccgtgcaactagtgcaaagtggtgcagaagttaagaagcctggagcctctgtgaaagtgtcttgcaaggcctctggctacaccttcaccgactactacatgaactgggtcaagcaggcccctggccggggcctggagtggatgggcgtgttcaacccctacaacggcgacacccggtacacccagaagtttaaggacaaggccaccctgaccatcgataagtccacctccaccgtgtacatggaactgaacagcctgagatccgaggataccgctgtgtactattgtgctagactgcgcctgctgtacgacacatccgagtactacgtgatggactactggggccagggcaccaccgtgacagtgtccagc

SEQ ID NO: 433 - DNA, 1434 bp, Artificial Sequence
  source: /note="Description of Artificial Sequence: Synthetic 1F3.1-lambda-5T4IM37_hu5T4_cl16-9(BM3) sequence"
ggcggcagcggcggctcccaagccgtggtaacccaggagcccagtctgacagtgagccctggcggtacagtgaccttgacttgcaggagcagtaccggagccgtaactacctcaaactacgccaactgggtgcagcagaagcccggtcaggcccccaggggccttattggtgggactaacaaacgagcacccggaacccccgcaaggttcagcggcagccttctgggcggaaaggccgctctcacattgagcggcgtgcagcccgaggacgaggccgagtactactgcgccctgtggtacagcaacctgtgggtgttcggcggagggaccaagctgaccgtgctgggccagcccaaagctgcgccgagcgtgaccctgttccccccgtcaagcgaggagctgcaggctaacaaggccaccctggtgtgcctgattagtgacttctaccccggtgccgtcaccgtggcctggaaggccgacagtagcccagttaaagcgggcgtcgagaccaccactcccagcaagcagagcaacaacaagtacgccgcgagcagctacctgagtctgacccccgagcagtggaagagccacaggagctacagctgccaggtgacccacgagggcagcactgtggagaagactgtggccccgaccgagtgccccccatgtagcggcggagggtccgaaaacgtgctaactcaaagtccagcaactctgtccctgtctccaggcgagagagccaccctcagctgttctgcctcctcttccgtgaactacatgcactggtatcaacagaagcctggccagagccctcggctgctgatctacgacacctccaagctggcctctggcatccctgctagattctccggctccggaagcggcaacgacttcaccctgaccatctccagcctggaacctgaggattttgccgtgtactactgcttccagggctctggctacccctacaccttcggcggaggcacaaaagtggagatcaagggcggaggtgggagtggcggcggtggtagcggtggcgggggatccggaggaggggggtcagccgtgcaactagtgcaaagtggtgcagaagttaagaagcctggagcctctgtgaaagtgtcttgcaaggcctctggctacaccttcaccgactactacatgaactgggtccggcaggcccctggccaaggcctggagtggatgggcgtgttcaacccctacaacggcgacacccggtacacccagaagtttaaggacagagtgaccatgaccagagatacatccacctccaccgtgtacatggaactgtctagcctgagatccgaggataccgctgtgtactattgtgctagactgcgcctgctgtacgacacatccgagtactacgtgatggactactggggccagggcaccaccgtgacagtgtccagc

SEQ ID NO: 434 - DNA, 1434 bp, Artificial Sequence
  source: /note="Description of Artificial Sequence: Synthetic 1F3.1-lambda-5T4IM38_hu5T4_cl16-10(BM7) sequence"
ggcggcagcggcggctcccaagccgtggtaacccaggagcccagtctgacagtgagccctggcggtacagtgaccttgacttgcaggagcagtaccggagccgtaactacctcaaactacgccaactgggtgcagcagaagcccggtcaggcccccaggggccttattggtgggactaacaaacgagcacccggaacccccgcaaggttcagcggcagccttctgggcggaaaggccgctctcacattgagcggcgtgcagcccgaggacgaggccgagtactactgcgccctgtggtacagcaacctgtgggtgttcggcggagggaccaagctgaccgtgctgggccagcccaaagctgcgccgagcgtgaccctgttccccccgtcaagcgaggagctgcaggctaacaaggccaccctggtgtgcctgattagtgacttctaccccggtgccgtcaccgtggcctggaaggccgacagtagcccagttaaagcgggcgtcgagaccaccactcccagcaagcagagcaacaacaagtacgccgcgagcagctacctgagtctgacccccgagcagtggaagagccacaggagctacagctgccaggtgacccacgagggcagcactgtggagaagactgtggccccgaccgagtgccccccatgtagcggcggagggtccgaaaacgtgctaactcaaagtccagcaactctgtccctgtctccaggcgagagagccaccctcagctgttctgcctcctcttccgtgaactacatgcactggtatcaacagaagcctggccagagccctcggctgctgatctacgacacctccaagctggcctctggcatccctgctagattctccggctccggaagcggcaacgacttcaccctgaccatctccagcctggaacctgaggattttgccgtgtactactgcttccagggctctggctacccctacaccttcggcggaggcacaaaagtggagatcaagggcggaggtgggagtggcggcggtggtagcggtggcgggggatccggaggaggggggtcagccgtgcaactagtgcaaagtggtgcagaagttaagaagcctggagcctctgtgaaagtgtcttgcaaggcctctggctacaccttcaccgactactacatgaactgggtccggcaggcccctggccaaggcctggagtggatgggcgtgttcaacccctacaacggcgacacccggtacacccagaagtttaaggacaaggtgaccatgaccatcgataagtccacctccaccgtgtacatggaactgaacagcctgagatccgaggataccgctgtgtactattgtgctagactgcgcctgctgtacgacacatccgagtactacgtgatggactactggggccagggcaccaccgtgacagtgtccagc

SEQ ID NO: 435 - DNA, 1434 bp, Artificial Sequence
  source: /note="Description of Artificial Sequence: Synthetic 1F3.1-lambda-5T4IM39_hu5T4_cl16-11(BM9) sequence"
ggcggcagcggcggctcccaagccgtggtaacccaggagcccagtctgacagtgagccctggcggtacagtgaccttgacttgcaggagcagtaccggagccgtaactacctcaaactacgccaactgggtgcagcagaagcccggtcaggcccccaggggccttattggtgggactaacaaacgagcacccggaacccccgcaaggttcagcggcagccttctgggcggaaaggccgctctcacattgagcggcgtgcagcccgaggacgaggccgagtactactgcgccctgtggtacagcaacctgtgggtgttcggcggagggaccaagctgaccgtgctgggccagcccaaagctgcgccgagcgtgaccctgttccccccgtcaagcgaggagctgcaggctaacaaggccaccctggtgtgcctgattagtgacttctaccccggtgccgtcaccgtggcctggaaggccgacagtagcccagttaaagcgggcgtcgagaccaccactcccagcaagcagagcaacaacaagtacgccgcgagcagctacctgagtctgacccccgagcagtggaagagccacaggagctacagctgccaggtgacccacgagggcagcactgtggagaagactgtggccccgaccgagtgccccccatgtagcggcggagggtccgaaaacgtgctaactcaaagtccagcaactctgtccctgtctccaggcgagagagccaccctcagctgttctgcctcctcttccgtgaactacatgcactggtatcaacagaagcctggccagagccctcggctgctgatctacgacacctccaagctggcctctggcatccctgctagattctccggctccggaagcggcaacgacttcaccctgaccatctccagcctggaacctgaggattttgccgtgtactactgcttccagggctctggctacccctacaccttcggcggaggcacaaaagtggagatcaagggcggaggtgggagtggcggcggtggtagcggtggcgggggatccggaggaggggggtcagccgtgcaactagtgcaaagtggtgcagaagttaagaagcctggagcctctgtgaaagtgtcttgcaaggcctctggctacaccttcaccgactactacatgaactgggtccggcaggcccctggccggggcctggagtggatgggcgtgttcaacccctacaacggcgacacccggtacacccagaagtttaaggacaaggtgaccctgaccatcgataagtccacctccaccgtgtacatggaactgaacagcctgagatccgaggataccgctgtgtactattgtgctagactgcgcctgctgtacgacacatccgagtactacgtgatggactactggggccagggcaccaccgtgacagtgtccagc

SEQ ID NO: 436 - DNA, 1434 bp, Artificial Sequence
  source: /note="Description of Artificial Sequence: Synthetic 1F3.1-lambda-5T4IM40_hu5T4_cl16-12(BM11) sequence"
ggcggcagcggcggctcccaagccgtggtaacccaggagcccagtctgacagtgagccctggcggtacagtgaccttgacttgcaggagcagtaccggagccgtaactacctcaaactacgccaactgggtgcagcagaagcccggtcaggcccccaggggccttattggtgggactaacaaacgagcacccggaacccccgcaaggttcagcggcagccttctgggcggaaaggccgctctcacattgagcggcgtgcagcccgaggacgaggccgagtactactgcgccctgtggtacagcaacctgtgggtgttcggcggagggaccaagctgaccgtgctgggccagcccaaagctgcgccgagcgtgaccctgttccccccgtcaagcgaggagctgcaggctaacaaggccaccctggtgtgcctgattagtgacttctaccccggtgccgtcaccgtggcctggaaggccgacagtagcccagttaaagcgggcgtcgagaccaccactcccagcaagcagagcaacaacaagtacgccgcgagcagctacctgagtctgacccccgagcagtggaagagccacaggagctacagctgccaggtgacccacgagggcagcactgtggagaagactgtggccccgaccgagtgccccccatgtagcggcggagggtccgaaaacgtgctaactcaaagtccagcaactctgtccctgtctccaggcgagagagccaccctcagctgttctgcctcctcttccgtgaactacatgcactggtatcaacagaagcctggccagagccctcggctgctgatctacgacacctccaagctggcctctggcatccctgctagattctccggctccggaagcggcaacgacttcaccctgaccatctccagcctggaacctgaggattttgccgtgtactactgcttccagggctctggctacccctacaccttcggcggaggcacaaaagtggagatcaagggcggaggtgggagtggcggcggtggtagcggtggcgggggatccggaggaggggggtcagccgtgcaactagtgcaaagtggtgcagaagttaagaagcctggagcctctgtgaaagtgtcttgcaaggcctctggctacaccttcaccgactactacatgaactgggtcaagcaggcccctggccggggcctggagtggatgggcgtgttcaacccctacaacggcgacacccggtacacccagaagtttaaggacaaggccaccctgaccatcgataagtccacctccaccgtgtacatggaactgaacagcctgagatccgaggataccgctgtgtactattgtgctagactgcgcctgctgtacgacacatccgagtactacgtgatggactactggggccagggcaccaccgtgacagtgtccagc

SEQ ID NO: 437 - DNA, 1434 bp, Artificial Sequence
  source: /note="Description of Artificial Sequence: Synthetic 1F3.1-lambda-5T4IM41_HuCL16-1 (BM0) sequence"
ggcggcagcggcggctcccaagccgtggtaacccaggagcccagtctgacagtgagccctggcggtacagtgaccttgacttgcaggagcagtaccggagccgtaactacctcaaactacgccaactgggtgcagcagaagcccggtcaggcccccaggggccttattggtgggactaacaaacgagcacccggaacccccgcaaggttcagcggcagccttctgggcggaaaggccgctctcacattgagcggcgtgcagcccgaggacgaggccgagtactactgcgccctgtggtacagcaacctgtgggtgttcggcggagggaccaagctgaccgtgctgggccagcccaaagctgcgccgagcgtgaccctgttccccccgtcaagcgaggagctgcaggctaacaaggccaccctggtgtgcctgattagtgacttctaccccggtgccgtcaccgtggcctggaaggccgacagtagcccagttaaagcgggcgtcgagaccaccactcccagcaagcagagcaacaacaagtacgccgcgagcagctacctgagtctgacccccgagcagtggaagagccacaggagctacagctgccaggtgacccacgagggcagcactgtggagaagactgtggccccgaccgagtgccccccatgtagcggcggagggtccgaaatcgtgctaactcaaagtccagcaactctgtccctgtctccaggcgagagagccaccctcagctgttctgcctcctcttccgtgaactacatgcactggtatcaacagaagcctggccaggctcctcggctgctgatctacgacacctccaagctggcctctggcatccctgctagattctccggctccggaagcggcaccgacttcaccctgaccatctccagcctggaacctgaggattttgccgtgtactactgcttccagggctctggctacccctacaccttcggcggaggcacaaaagtggagatcaagggcggaggtgggagtggcggcggtggtagcggtggcgggggatccggaggaggggggtcacaggtgcaactagtgcaaagtggtgcagaagttaagaagcctggagcctctgtgaaagtgtcttgcaaggcctctggctacaccttcaccgactactacatgaactgggtccggcaggcccctggccaaggcctggagtggatgggcgtgttcaacccctacaacggcgacacccggtacacccagaagtttaaggacagagtgaccatgaccagagatacatccatctccaccgcctacatggaactgtctcggctgagatccgacgataccgctgtgtactattgtgctagactgcgcctgctgtacgacacatccgagtactacgtgatggactactggggccagggcaccaccgtgacagtgtccagc

SEQ ID NO: 438 - DNA, 1434 bp, Artificial Sequence
  source: /note="Description of Artificial Sequence: Synthetic 1F3.1-lambda-5T4IM42_HuCL16-2 (BM2) sequence"
ggcggcagcggcggctcccaagccgtggtaacccaggagcccagtctgacagtgagccctggcggtacagtgaccttgacttgcaggagcagtaccggagccgtaactacctcaaactacgccaactgggtgcagcagaagcccggtcaggcccccaggggccttattggtgggactaacaaacgagcacccggaacccccgcaaggttcagcggcagccttctgggcggaaaggccgctctcacattgagcggcgtgcagcccgaggacgaggccgagtactactgcgccctgtggtacagcaacctgtgggtgttcggcggagggaccaagctgaccgtgctgggccagcccaaagctgcgccgagcgtgaccctgttccccccgtcaagcgaggagctgcaggctaacaaggccaccctggtgtgcctgattagtgacttctaccccggtgccgtcaccgtggcctggaaggccgacagtagcccagttaaagcgggcgtcgagaccaccactcccagcaagcagagcaacaacaagtacgccgcgagcagctacctgagtctgacccccgagcagtggaagagccacaggagctacagctgccaggtgacccacgagggcagcactgtggagaagactgtggccccgaccgagtgccccccatgtagcggcggagggtccgaaatcgtgctaactcaaagtccagcaactctgtccctgtctccaggcgagagagccaccctcagctgttctgcctcctcttccgtgaactacatgcactggtatcaacagaagcctggccaggctcctcggctgctgatctacgacacctccaagctggcctctggcatccctgctagattctccggctccggaagcggcaccgacttcaccctgaccatctccagcctggaacctgaggattttgccgtgtactactgcttccagggctctggctacccctacaccttcggcggaggcacaaaagtggagatcaagggcggaggtgggagtggcggcggtggtagcggtggcgggggatccggaggaggggggtcacaggtgcaactagtgcaaagtggtgcagaagttaagaagcctggagcctctgtgaaagtgtcttgcaaggcctctggctacaccttcaccgactactacatgaactgggtccggcaggcccctggccaaggcctggagtggatgggcgtgttcaacccctacaacggcgacacccggtacacccagaagtttaaggacagagtgaccatgaccatcgataagtccatctccaccgcctacatggaactgtctcggctgagatccgacgataccgctgtgtactattgtgctagactgcgcctgctgtacgacacatccgagtactacgtgatggactactggggccagggcaccaccgtgacagtgtccagc

SEQ ID NO: 439 - DNA, 1434 bp, Artificial Sequence
  source: /note="Description of Artificial Sequence: Synthetic 1F3.1-lambda-5T4IM43_HuCL16-3 (BM3) sequence"
ggcggcagcggcggctcccaagccgtggtaacccaggagcccagtctgacagtgagccctggcggtacagtgaccttgacttgcaggagcagtaccggagccgtaactacctcaaactacgccaactgggtgcagcagaagcccggtcaggcccccaggggccttattggtgggactaacaaacgagcacccggaacccccgcaaggttcagcggcagccttctgggcggaaaggccgctctcacattgagcggcgtgcagcccgaggacgaggccgagtactactgcgccctgtggtacagcaacctgtgggtgttcggcggagggaccaagctgaccgtgctgggccagcccaaagctgcgccgagcgtgaccctgttccccccgtcaagcgaggagctgcaggctaacaaggccaccctggtgtgcctgattagtgacttctaccccggtgccgtcaccgtggcctggaaggccgacagtagcccagttaaagcgggcgtcgagaccaccactcccagcaagcagagcaacaacaagtacgccgcgagcagctacctgagtctgacccccgagcagtggaagagccacaggagctacagctgccaggtgacccacgagggcagcactgtggagaagactgtggccccgaccgagtgccccccatgtagcggcggagggtccgaaatcgtgctaactcaaagtccagcaactctgtccctgtctccaggcgagagagccaccctcagctgttctgcctcctcttccgtgaactacatgcactggtatcaacagaagcctggccaggctcctcggctgctgatctacgacacctccaagctggcctctggcatccctgctagattctccggctccggaagcggcaccgacttcaccctgaccatctccagcctggaacctgaggattttgccgtgtactactgcttccagggctctggctacccctacaccttcggcggaggcacaaaagtggagatcaagggcggaggtgggagtggcggcggtggtagcggtggcgggggatccggaggaggggggtcacaggtgcaactagtgcaaagtggtgcagaagttaagaagcctggagcctctgtgaaagtgtcttgcaaggcctctggctacaccttcaccgactactacatgaactgggtccggcaggcccctggccggggcctggagtggatgggcgtgttcaacccctacaacggcgacacccggtacacccagaagtttaaggacagagtgaccatgaccatcgataagtccatctccaccgcctacatggaactgtctcggctgagatccgacgataccgctgtgtactattgtgctagactgcgcctgctgtacgacacatccgagtactacgtgatggactactggggccagggcaccaccgtgacagtgtccagc

SEQ ID NO: 440 - DNA, 1434 bp, Artificial Sequence
  source: /note="Description of Artificial Sequence: Synthetic 1F3.1-lambda-5T4IM44_HuCL16-4 (BM6) sequence"
ggcggcagcggcggctcccaagccgtggtaacccaggagcccagtctgacagtgagccctggcggtacagtgaccttgacttgcaggagcagtaccggagccgtaactacctcaaactacgccaactgggtgcagcagaagcccggtcaggcccccaggggccttattggtgggactaacaaacgagcacccggaacccccgcaaggttcagcggcagccttctgggcggaaaggccgctctcacattgagcggcgtgcagcccgaggacgaggccgagtactactgcgccctgtggtacagcaacctgtgggtgttcggcggagggaccaagctgaccgtgctgggccagcccaaagctgcgccgagcgtgaccctgttccccccgtcaagcgaggagctgcaggctaacaaggccaccctggtgtgcctgattagtgacttctaccccggtgccgtcaccgtggcctggaaggccgacagtagcccagttaaagcgggcgtcgagaccaccactcccagcaagcagagcaacaacaagtacgccgcgagcagctacctgagtctgacccccgagcagtggaagagccacaggagctacagctgccaggtgacccacgagggcagcactgtggagaagactgtggccccgaccgagtgccccccatgtagcggcggagggtccgaaatcgtgctaactcaaagtccagcaactctgtccctgtctccaggcgagagagccaccctcagctgttctgcctcctcttccgtgaactacatgcactggtatcaacagaagcctggccaggctcctcggctgctgatctacgacacctccaagctggcctctggcatccctgctagattctccggctccggaagcggcaccgacttcaccctgaccatctccagcctggaacctgaggattttgccgtgtactactgcttccagggctctggctacccctacaccttcggcggaggcacaaaagtggagatcaagggcggaggtgggagtggcggcggtggtagcggtggcgggggatccggaggaggggggtcacaggtgcaactagtgcaaagtggtgcagaagttaagaagcctggagcctctgtgaaagtgtcttgcaaggcctctggctacaccttcaccgactactacatgaactgggtccggcaggcccctggccggggcctggagtggatcggcgtgttcaacccctacaacggcgacacccggtacacccagaagtttaaggacagagccaccctcaccatcgataagtccatctccaccgcctacatggaactgtctcggctgagatccgacgataccgctgtgtactattgtgctagactgcgcctgctgtacgacacatccgagtactacgtgatggactactggggccagggcaccaccgtgacagtgtccagc

SEQ ID NO: 441 - DNA, 1434 bp, Artificial Sequence
  source: /note="Description of Artificial Sequence: Synthetic 1F3.1-lambda-5T4IM45_HuCL16-5 (BM9) sequence"
ggcggcagcggcggctcccaagccgtggtaacccaggagcccagtctgacagtgagccctggcggtacagtgaccttgacttgcaggagcagtaccggagccgtaactacctcaaactacgccaactgggtgcagcagaagcccggtcaggcccccaggggccttattggtgggactaacaaacgagcacccggaacccccgcaaggttcagcggcagccttctgggcggaaaggccgctctcacattgagcggcgtgcagcccgaggacgaggccgagtactactgcgccctgtggtacagcaacctgtgggtgttcggcggagggaccaagctgaccgtgctgggccagcccaaagctgcgccgagcgtgaccctgttccccccgtcaagcgaggagctgcaggctaacaaggccaccctggtgtgcctgattagtgacttctaccccggtgccgtcaccgtggcctggaaggccgacagtagcccagttaaagcgggcgtcgagaccaccactcccagcaagcagagcaacaacaagtacgccgcgagcagctacctgagtctgacccccgagcagtggaagagccacaggagctacagctgccaggtgacccacgagggcagcactgtggagaagactgtggccccgaccgagtgccccccatgtagcggcggagggtccgaaatcgtgctaactcaaagtccagcaactctgtccctgtctccaggcgagagagccaccctcagctgttctgcctcctcttccgtgaactacatgcactggtatcaacagaagcctggccaggctcctcggctgctgatctacgacacctccaagctggcctctggcatccctgctagattctccggctccggaagcggcaccgacttcaccctgaccatctccagcctggaacctgaggattttgccgtgtactactgcttccagggctctggctacccctacaccttcggcggaggcacaaaagtggagatcaagggcggaggtgggagtggcggcggtggtagcggtggcgggggatccggaggaggggggtcacaggtgcaactagtgcaaagtggtgcagaagttaagaagcctggagcctctgtgaaagtgtcttgcaaggcctctggctaccccttcaccgactactacatgaactgggtccggcaggcccctggccggggcctggagtggatcggcgtgttcaacccctacaacggcgacacccggtacacccagaagtttaaggacaaggccaccctcaccatcgataagtccatctccaccgcctacatggaactgaaccggctgagatccgacgataccgctgtgtactattgtgctagactgcgcctgctgtacgacacatccgagtactacgtgatggactactggggccagggcaccaccgtgacagtgtccagc

SEQ ID NO: 442 - DNA, 1434 bp, Artificial Sequence
  source: /note="Description of Artificial Sequence: Synthetic 1F3.1-lambda-5T4IM46_HuCL16-6 (BM2) sequence"
ggcggcagcggcggctcccaagccgtggtaacccaggagcccagtctgacagtgagccctggcggtacagtgaccttgacttgcaggagcagtaccggagccgtaactacctcaaactacgccaactgggtgcagcagaagcccggtcaggcccccaggggccttattggtgggactaacaaacgagcacccggaacccccgcaaggttcagcggcagccttctgggcggaaaggccgctctcacattgagcggcgtgcagcccgaggacgaggccgagtactactgcgccctgtggtacagcaacctgtgggtgttcggcggagggaccaagctgaccgtgctgggccagcccaaagctgcgccgagcgtgaccctgttccccccgtcaagcgaggagctgcaggctaacaaggccaccctggtgtgcctgattagtgacttctaccccggtgccgtcaccgtggcctggaaggccgacagtagcccagttaaagcgggcgtcgagaccaccactcccagcaagcagagcaacaacaagtacgccgcgagcagctacctgagtctgacccccgagcagtggaagagccacaggagctacagctgccaggtgacccacgagggcagcactgtggagaagactgtggccccgaccgagtgccccccatgtagcggcggagggtccgaaaacgtgctaactcaaagtccagcaactctgtccctgtctccaggcgagagagccaccctcagctgttctgcctcctcttccgtgaactacatgcactggtatcaacagaagcctggccaggctcctcggctgctgatctacgacacctccaagctggcctctggcatccctgctagattctccggctccggaagcggcaccgactacaccctgaccatctccagcctggaacctgaggattttgccgtgtactactgcttccagggctctggctacccctacaccttcggcggaggcacaaaagtggagatcaagggcggaggtgggagtggcggcggtggtagcggtggcgggggatccggaggaggggggtcacaggtgcaactagtgcaaagtggtgcagaagttaagaagcctggagcctctgtgaaagtgtcttgcaaggcctctggctacaccttcaccgactactacatgaactgggtccggcaggcccctggccaaggcctggagtggatgggcgtgttcaacccctacaacggcgacacccggtacacccagaagtttaaggacagagtgaccatgaccagagatacatccatctccaccgcctacatggaactgtctcggctgagatccgacgataccgctgtgtactattgtgctagactgcgcctgctgtacgacacatccgagtactacgtgatggactactggggccagggcaccaccgtgacagtgtccagc

SEQ ID NO: 443 - DNA, 1434 bp, Artificial Sequence
  source: /note="Description of Artificial Sequence: Synthetic 1F3.1-lambda-5T4IM47_HuCL16-7 (BM4) sequence"
ggcggcagcggcggctcccaagccgtggtaacccaggagcccagtctgacagtgagccctggcggtacagtgaccttgacttgcaggagcagtaccggagccgtaactacctcaaactacgccaactgggtgcagcagaagcccggtcaggcccccaggggccttattggtgggactaacaaacgagcacccggaacccccgcaaggttcagcggcagccttctgggcggaaaggccgctctcacattgagcggcgtgcagcccgaggacgaggccgagtactactgcgccctgtggtacagcaacctgtgggtgttcggcggagggaccaagctgaccgtgctgggccagcccaaagctgcgccgagcgtgaccctgttccccccgtcaagcgaggagctgcaggctaacaaggccaccctggtgtgcctgattagtgacttctaccccggtgccgtcaccgtggcctggaaggccgacagtagcccagttaaagcgggcgtcgagaccaccactcccagcaagcagagcaacaacaagtacgccgcgagcagctacctgagtctgacccccgagcagtggaagagccacaggagctacagctgccaggtgacccacgagggcagcactgtggagaagactgtggccccgaccgagtgccccccatgtagcggcggagggtccgaaaacgtgctaactcaaagtccagcaactctgtccctgtctccaggcgagagagccaccctcagctgttctgcctcctcttccgtgaactacatgcactggtatcaacagaagcctggccaggctcctcggctgctgatctacgacacctccaagctggcctctggcatccctgctagattctccggctccggaagcggcaccgactacaccctgaccatctccagcctggaacctgaggattttgccgtgtactactgcttccagggctctggctacccctacaccttcggcggaggcacaaaagtggagatcaagggcggaggtgggagtggcggcggtggtagcggtggcgggggatccggaggaggggggtcacaggtgcaactagtgcaaagtggtgcagaagttaagaagcctggagcctctgtgaaagtgtcttgcaaggcctctggctacaccttcaccgactactacatgaactgggtccggcaggcccctggccaaggcctggagtggatgggcgtgttcaacccctacaacggcgacacccggtacacccagaagtttaaggacagagtgaccatgaccatcgataagtccatctccaccgcctacatggaactgtctcggctgagatccgacgataccgctgtgtactattgtgctagactgcgcctgctgtacgacacatccgagtactacgtgatggactactggggccagggcaccaccgtgacagtgtccagc

SEQ ID NO: 444 - DNA, 1434 bp, Artificial Sequence
  source: /note="Description of Artificial Sequence: Synthetic 1F3.1-lambda-5T4IM48_HuCL16-8 (BM5) sequence"
ggcggcagcggcggctcccaagccgtggtaacccaggagcccagtctgacagtgagccctggcggtacagtgaccttgacttgcaggagcagtaccggagccgtaactacctcaaactacgccaactgggtgcagcagaagcccggtcaggcccccaggggccttattggtgggactaacaaacgagcacccggaacccccgcaaggttcagcggcagccttctgggcggaaaggccgctctcacattgagcggcgtgcagcccgaggacgaggccgagtactactgcgccctgtggtacagcaacctgtgggtgttcggcggagggaccaagctgaccgtgctgggccagcccaaagctgcgccgagcgtgaccctgttccccccgtcaagcgaggagctgcaggctaacaaggccaccctggtgtgcctgattagtgacttctaccccggtgccgtcaccgtggcctggaaggccgacagtagcccagttaaagcgggcgtcgagaccaccactcccagcaagcagagcaacaacaagtacgccgcgagcagctacctgagtctgacccccgagcagtggaagagccacaggagctacagctgccaggtgacccacgagggcagcactgtggagaagactgtggccccgaccgagtgccccccatgtagcggcggagggtccgaaaacgtgctaactcaaagtccagcaactctgtccctgtctccaggcgagagagccaccctcagctgttctgcctcctcttccgtgaactacatgcactggtatcaacagaagcctggccaggctcctcggctgctgatctacgacacctccaagctggcctctggcatccctgctagattctccggctccggaagcggcaccgactacaccctgaccatctccagcctggaacctgaggattttgccgtgtactactgcttccagggctctggctacccctacaccttcggcggaggcacaaaagtggagatcaagggcggaggtgggagtggcggcggtggtagcggtggcgggggatccggaggaggggggtcacaggtgcaactagtgcaaagtggtgcagaagttaagaagcctggagcctctgtgaaagtgtcttgcaaggcctctggctacaccttcaccgactactacatgaactgggtccggcaggcccctggccggggcctggagtggatgggcgtgttcaacccctacaacggcgacacccggtacacccagaagtttaaggacagagtgaccatgaccatcgataagtccatctccaccgcctacatggaactgtctcggctgagatccgacgataccgctgtgtactattgtgctagactgcgcctgctgtacgacacatccgagtactacgtgatggactactggggccagggcaccaccgtgacagtgtccagc

SEQ ID NO: 445 - DNA, 1434 bp, Artificial Sequence
  source: /note="Description of Artificial Sequence: Synthetic 1F3.1-lambda-5T4IM49_HuCL16-9 (BM8) sequence"
ggcggcagcggcggctcccaagccgtggtaacccaggagcccagtctgacagtgagccctggcggtacagtgaccttgacttgcaggagcagtaccggagccgtaactacctcaaactacgccaactgggtgcagcagaagcccggtcaggcccccaggggccttattggtgggactaacaaacgagcacccggaacccccgcaaggttcagcggcagccttctgggcggaaaggccgctctcacattgagcggcgtgcagcccgaggacgaggccgagtactactgcgccctgtggtacagcaacctgtgggtgttcggcggagggaccaagctgaccgtgctgggccagcccaaagctgcgccgagcgtgaccctgttccccccgtcaagcgaggagctgcaggctaacaaggccaccctggtgtgcctgattagtgacttctaccccggtgccgtcaccgtggcctggaaggccgacagtagcccagttaaagcgggcgtcgagaccaccactcccagcaagcagagcaacaacaagtacgccgcgagcagctacctgagtctgacccccgagcagtggaagagccacaggagctacagctgccaggtgacccacgagggcagcactgtggagaagactgtggccccgaccgagtgccccccatgtagcggcggagggtccgaaaacgtgctaactcaaagtccagcaactctgtccctgtctccaggcgagagagccaccctcagctgttctgcctcctcttccgtgaactacatgcactggtatcaacagaagcctggccaggctcctcggctgctgatctacgacacctccaagctggcctctggcatccctgctagattctccggctccggaagcggcaccgactacaccctgaccatctccagcctggaacctgaggattttgccgtgtactactgcttccagggctctggctacccctacaccttcggcggaggcacaaaagtggagatcaagggcggaggtgggagtggcggcggtggtagcggtggcgggggatccggaggaggggggtcacaggtgcaactagtgcaaagtggtgcagaagttaagaagcctggagcctctgtgaaagtgtcttgcaaggcctctggctacaccttcaccgactactacatgaactgggtccggcaggcccctggccggggcctggagtggatcggcgtgttcaacccctacaacggcgacacccggtacacccagaagtttaaggacagagccaccctcaccatcgataagtccatctccaccgcctacatggaactgtctcggctgagatccgacgataccgctgtgtactattgtgctagactgcgcctgctgtacgacacatccgagtactacgtgatggactactggggccagggcaccaccgtgacagtgtccagc

SEQ ID NO: 446 - DNA, 1434 bp, Artificial Sequence
  source: /note="Description of Artificial Sequence: Synthetic 1F3.1-lambda-5T4IM50_HuCL16-10 (BM11) sequence"
ggcggcagcggcggctcccaagccgtggtaacccaggagcccagtctgacagtgagccctggcggtacagtgaccttgacttgcaggagcagtaccggagccgtaactacctcaaactacgccaactgggtgcagcagaagcccggtcaggcccccaggggccttattggtgggactaacaaacgagcacccggaacccccgcaaggttcagcggcagccttctgggcggaaaggccgctctcacattgagcggcgtgcagcccgaggacgaggccgagtactactgcgccctgtggtacagcaacctgtgggtgttcggcggagggaccaagctgaccgtgctgggccagcccaaagctgcgccgagcgtgaccctgttccccccgtcaagcgaggagctgcaggctaacaaggccaccctggtgtgcctgattagtgacttctaccccggtgccgtcaccgtggcctggaaggccgacagtagcccagttaaagcgggcgtcgagaccaccactcccagcaagcagagcaacaacaagtacgccgcgagcagctacctgagtctgacccccgagcagtggaagagccacaggagctacagctgccaggtgacccacgagggcagcactgtggagaagactgtggccccgaccgagtgccccccatgtagcggcggagggtccgaaaacgtgctaactcaaagtccagcaactctgtccctgtctccaggcgagagagccaccctcagctgttctgcctcctcttccgtgaactacatgcactggtatcaacagaagcctggccaggctcctcggctgctgatctacgacacctccaagctggcctctggcatccctgctagattctccggctccggaagcggcaccgactacaccctgaccatctccagcctggaacctgaggattttgccgtgtactactgcttccagggctctggctacccctacaccttcggcggaggcacaaaagtggagatcaagggcggaggtgggagtggcggcggtggtagcggtggcgggggatccggaggaggggggtcacaggtgcaactagtgcaaagtggtgcagaagttaagaagcctggagcctctgtgaaagtgtcttgcaaggcctctggctaccccttcaccgactactacatgaactgggtccggcaggcccctggccggggcctggagtggatcggcgtgttcaacccctacaacggcgacacccggtacacccagaagtttaaggacaaggccaccctcaccatcgataagtccatctccaccgcctacatggaactgaaccggctgagatccgacgataccgctgtgtactattgtgctagactgcgcctgctgtacgacacatccgagtactacgtgatggactactggggccagggcaccaccgtgacagtgtccagc

SEQ ID NO: 447 - DNA, 1434 bp, Artificial Sequence
  source: /note="Description of Artificial Sequence: Synthetic 1F3.1-lambda-5T4IM51_HuCL16-11 (BM4) sequence"
ggcggcagcggcggctcccaagccgtggtaacccaggagcccagtctgacagtgagccctggcggtacagtgaccttgacttgcaggagcagtaccggagccgtaactacctcaaactacgccaactgggtgcagcagaagcccggtcaggcccccaggggccttattggtgggactaacaaacgagcacccggaacccccgcaaggttcagcggcagccttctgggcggaaaggccgctctcacattgagcggcgtgcagcccgaggacgaggccgagtactactgcgccctgtggtacagcaacctgtgggtgttcggcggagggaccaagctgaccgtgctgggccagcccaaagctgcgccgagcgtgaccctgttccccccgtcaagcgaggagctgcaggctaacaaggccaccctggtgtgcctgattagtgacttctaccccggtgccgtcaccgtggcctggaaggccgacagtagcccagttaaagcgggcgtcgagaccaccactcccagcaagcagagcaacaacaagtacgccgcgagcagctacctgagtctgacccccgagcagtggaagagccacaggagctacagctgccaggtgacccacgagggcagcactgtggagaagactgtggccccgaccgagtgccccccatgtagcggcggagggtccgaaaacgtgctaactcaaagtccagcaactctgtccctgtctccaggcgagagagccaccctcagctgttctgcctcctcttccgtgaactacatgcactggtatcaacagaagcctggccagagccctcggctgctgatctacgacacctccaagctggcctctggcatccctgctagattctccggctccggaagcggcaccgactacaccctgaccatctccagcctggaacctgaggattttgccgtgtacttctgcttccagggctctggctacccctacaccttcggcggaggcacaaaagtggagatcaagggcggaggtgggagtggcggcggtggtagcggtggcgggggatccggaggaggggggtcacaggtgcaactagtgcaaagtggtgcagaagttaagaagcctggagcctctgtgaaagtgtcttgcaaggcctctggctacaccttcaccgactactacatgaactgggtccggcaggcccctggccaaggcctggagtggatgggcgtgttcaacccctacaacggcgacacccggtacacccagaagtttaaggacagagtgaccatgaccagagatacatccatctccaccgcctacatggaactgtctcggctgagatccgacgataccgctgtgtactattgtgctagactgcgcctgctgtacgacacatccgagtactacgtgatggactactggggccagggcaccaccgtgacagtgtccagc

SEQ ID NO: 448 - DNA, 1434 bp, Artificial Sequence
  source: /note="Description of Artificial Sequence: Synthetic 1F3.1-lambda-5T4IM52_HuCL16-12 (BM6) sequence"
ggcggcagcggcggctcccaagccgtggtaacccaggagcccagtctgacagtgagccctggcggtacagtgaccttgacttgcaggagcagtaccggagccgtaactacctcaaactacgccaactgggtgcagcagaagcccggtcaggcccccaggggccttattggtgggactaacaaacgagcacccggaacccccgcaaggttcagcggcagccttctgggcggaaaggccgctctcacattgagcggcgtgcagcccgaggacgaggccgagtactactgcgccctgtggtacagcaacctgtgggtgttcggcggagggaccaagctgaccgtgctgggccagcccaaagctgcgccgagcgtgaccctgttccccccgtcaagcgaggagctgcaggctaacaaggccaccctggtgtgcctgattagtgacttctaccccggtgccgtcaccgtggcctggaaggccgacagtagcccagttaaagcgggcgtcgagaccaccactcccagcaagcagagcaacaacaagtacgccgcgagcagctacctgagtctgacccccgagcagtggaagagccacaggagctacagctgccaggtgacccacgagggcagcactgtggagaagactgtggccccgaccgagtgccccccatgtagcggcggagggtccgaaaacgtgctaactcaaagtccagcaactctgtccctgtctccaggcgagagagccaccctcagctgttctgcctcctcttccgtgaactacatgcactggtatcaacagaagcctggccagagccctcggctgctgatctacgacacctccaagctggcctctggcatccctgctagattctccggctccggaagcggcaccgactacaccctgaccatctccagcctggaacctgaggattttgccgtgtacttctgcttccagggctctggctacccctacaccttcggcggaggcacaaaagtggagatcaagggcggaggtgggagtggcggcggtggtagcggtggcgggggatccggaggaggggggtcacaggtgcaactagtgcaaagtggtgcagaagttaagaagcctggagcctctgtgaaagtgtcttgcaaggcctctggctacaccttcaccgactactacatgaactgggtccggcaggcccctggccaaggcctggagtggatgggcgtgttcaacccctacaacggcgacacccggtacacccagaagtttaaggacagagtgaccatgaccatcgataagtccatctccaccgcctacatggaactgtctcggctgagatccgacgataccgctgtgtactattgtgctagactgcgcctgctgtacgacacatccgagtactacgtgatggactactggggccagggcaccaccgtgacagtgtccagc

SEQ ID NO: 449 - DNA, 1434 bp, Artificial Sequence
  source: /note="Description of Artificial Sequence: Synthetic 1F3.1-lambda-5T4IM53_HuCL16-13 (BM7) sequence"
ggcggcagcggcggctcccaagccgtggtaacccaggagcccagtctgacagtgagccctggcggtacagtgaccttgacttgcaggagcagtaccggagccgtaactacctcaaactacgccaactgggtgcagcagaagcccggtcaggcccccaggggccttattggtgggactaacaaacgagcacccggaacccccgcaaggttcagcggcagccttctgggcggaaaggccgctctcacattgagcggcgtgcagcccgaggacgaggccgagtactactgcgccctgtggtacagcaacctgtgggtgttcggcggagggaccaagctgaccgtgctgggccagcccaaagctgcgccgagcgtgaccctgttccccccgtcaagcgaggagctgcaggctaacaaggccaccctggtgtgcctgattagtgacttctaccccggtgccgtcaccgtggcctggaaggccgacagtagcccagttaaagcgggcgtcgagaccaccactcccagcaagcagagcaacaacaagtacgccgcgagcagctacctgagtctgacccccgagcagtggaagagccacaggagctacagctgccaggtgacccacgagggcagcactgtggagaagactgtggccccgaccgagtgccccccatgtagcggcggagggtccgaaaacgtgctaactcaaagtccagcaactctgtccctgtctccaggcgagagagccaccctcagctgttctgcctcctcttccgtgaactacatgcactggtatcaacagaagcctggccagagccctcggctgctgatctacgacacctccaagctggcctctggcatccctgctagattctccggctccggaagcggcaccgactacaccctgaccatctccagcctggaacctgaggattttgccgtgtacttctgcttccagggctctggctacccctacaccttcggcggaggcacaaaagtggagatcaagggcggaggtgggagtggcggcggtggtagcggtggcgggggatccggaggaggggggtcacaggtgcaactagtgcaaagtggtgcagaagttaagaagcctggagcctctgtgaaagtgtcttgcaaggcctctggctacaccttcaccgactactacatgaactgggtccggcaggcccctggccggggcctggagtggatgggcgtgttcaacccctacaacggcgacacccggtacacccagaagtttaaggacagagtgaccatgaccatcgataagtccatctccaccgcctacatggaactgtctcggctgagatccgacgataccgctgtgtactattgtgctagactgcgcctgctgtacgacacatccgagtactacgtgatggactactggggccagggcaccaccgtgacagtgtccagc

SEQ ID NO: 450 - DNA, 1434 bp, Artificial Sequence
  source: /note="Description of Artificial Sequence: Synthetic 1F3.1-lambda-5T4IM54_HuCL16-14 (BM10) sequence"
ggcggcagcggcggctcccaagccgtggtaacccaggagcccagtctgacagtgagccctggcggtacagtgaccttgacttgcaggagcagtaccggagccgtaactacctcaaactacgccaactgggtgcagcagaagcccggtcaggcccccaggggccttattggtgggactaacaaacgagcacccggaacccccgcaaggttcagcggcagccttctgggcggaaaggccgctctcacattgagcggcgtgcagcccgaggacgaggccgagtactactgcgccctgtggtacagcaacctgtgggtgttcggcggagggaccaagctgaccgtgctgggccagcccaaagctgcgccgagcgtgaccctgttccccccgtcaagcgaggagctgcaggctaacaaggccaccctggtgtgcctgattagtgacttctaccccggtgccgtcaccgtggcctggaaggccgacagtagcccagttaaagcgggcgtcgagaccaccactcccagcaagcagagcaacaacaagtacgccgcgagcagctacctgagtctgacccccgagcagtggaagagccacaggagctacagctgccaggtgacccacgagggcagcactgtggagaagactgtggccccgaccgagtgccccccatgtagcggcggagggtccgaaaacgtgctaactcaaagtccagcaactctgtccctgtctccaggcgagagagccaccctcagctgttctgcctcctcttccgtgaactacatgcactggtatcaacagaagcctggccagagccctcggctgctgatctacgacacctccaagctggcctctggcatccctgctagattctccggctccggaagcggcaccgactacaccctgaccatctccagcctggaacctgaggattttgccgtgtacttctgcttccagggctctggctacccctacaccttcggcggaggcacaaaagtggagatcaagggcggaggtgggagtggcggcggtggtagcggtggcgggggatccggaggaggggggtcacaggtgcaactagtgcaaagtggtgcagaagttaagaagcctggagcctctgtgaaagtgtcttgcaaggcctctggctacaccttcaccgactactacatgaactgggtccggcaggcccctggccggggcctggagtggatcggcgtgttcaacccctacaacggcgacacccggtacacccagaagtttaaggacagagccaccctcaccatcgataagtccatctccaccgcctacatggaactgtctcggctgagatccgacgataccgctgtgtactattgtgctagactgcgcctgctgtacgacacatccgagtactacgtgatggactactggggccagggcaccaccgtgacagtgtccagc

SEQ ID NO: 451 - DNA, 1434 bp, Artificial Sequence
  source: /note="Description of Artificial Sequence: Synthetic 1F3.1-lambda-5T4IM55_HuCL16-15 (BM13) sequence"
ggcggcagcggcggctcccaagccgtggtaacccaggagcccagtctgacagtgagccctggcggtacagtgaccttgacttgcaggagcagtaccggagccgtaactacctcaaactacgccaactgggtgcagcagaagcccggtcaggcccccaggggccttattggtgggactaacaaacgagcacccggaacccccgcaaggttcagcggcagccttctgggcggaaaggccgctctcacattgagcggcgtgcagcccgaggacgaggccgagtactactgcgccctgtggtacagcaacctgtgggtgttcggcggagggaccaagctgaccgtgctgggccagcccaaagctgcgccgagcgtgaccctgttccccccgtcaagcgaggagctgcaggctaacaaggccaccctggtgtgcctgattagtgacttctaccccggtgccgtcaccgtggcctggaaggccgacagtagcccagttaaagcgggcgtcgagaccaccactcccagcaagcagagcaacaacaagtacgccgcgagcagctacctgagtctgacccccgagcagtggaagagccacaggagctacagctgccaggtgacccacgagggcagcactgtggagaagactgtggccccgaccgagtgccccccatgtagcggcggagggtccgaaaacgtgctaactcaaagtccagcaactctgtccctgtctccaggcgagagagccaccctcagctgttctgcctcctcttccgtgaactacatgcactggtatcaacagaagcctggccagagccctcggctgctgatctacgacacctccaagctggcctctggcatccctgctagattctccggctccggaagcggcaccgactacaccctgaccatctccagcctggaacctgaggattttgccgtgtacttctgcttccagggctctggctacccctacaccttcggcggaggcacaaaagtggagatcaagggcggaggtgggagtggcggcggtggtagcggtggcgggggatccggaggaggggggtcacaggtgcaactagtgcaaagtggtgcagaagttaagaagcctggagcctctgtgaaagtgtcttgcaaggcctctggctaccccttcaccgactactacatgaactgggtccggcaggcccctggccggggcctggagtggatcggcgtgttcaacccctacaacggcgacacccggtacacccagaagtttaaggacaaggccaccctcaccatcgataagtccatctccaccgcctacatggaactgaaccggctgagatccgacgataccgctgtgtactattgtgctagactgcgcctgctgtacgacacatccgagtactacgtgatggactactggggccagggcaccaccgtgacagtgtccagc

SEQ ID NO: 452 - DNA, 1434 bp, Artificial Sequence
  source: /note="Description of Artificial Sequence: Synthetic 1F3.1-lambda-5T4IM56_5T4_CL16 (NG to QG) sequence"
ggcggcagcggcggctcccaagccgtggtaacccaggagcccagtctgacagtgagccctggcggtacagtgaccttgacttgcaggagcagtaccggagccgtaactacctcaaactacgccaactgggtgcagcagaagcccggtcaggcccccaggggccttattggtgggactaacaaacgagcacccggaacccccgcaaggttcagcggcagccttctgggcggaaaggccgctctcacattgagcggcgtgcagcccgaggacgaggccgagtactactgcgccctgtggtacagcaacctgtgggtgttcggcggagggaccaagctgaccgtgctgggccagcccaaagctgcgccgagcgtgaccctgttccccccgtcaagcgaggagctgcaggctaacaaggccaccctggtgtgcctgattagtgacttctaccccggtgccgtcaccgtggcctggaaggccgacagtagcccagttaaagcgggcgtcgagaccaccactcccagcaagcagagcaacaacaagtacgccgcgagcagctacctgagtctgacccccgagcagtggaagagccacaggagctacagctgccaggtgacccacgagggcagcactgtggagaagactgtggccccgaccgagtgccccccatgtagcggcggagggtccgaaaatgttctcacccagtctccagcaatcatgtctgcatctccaggggaaaaggtcaccatgacctgcagtgccagctcaagtgtaaattacatgcactggtaccagcagaagtcaaacacctcccccaaactctggatttatgacacatccaaactggcttctggagtcccaggtcgcttcagtggcagtgggtctggaaactcttactctctcacgatcagcagcatggaggctgaagatgttgccacttatttctgttttcaggggagtgggtacccgtacacgttcggaggggggaccaagctggaaataaaaggcggaggtgggagtggcggcggtggtagcggtggcgggggatccggaggaggggggtcagcggtccagctgcaacagtctggacctgtgcgggtgaagcctggggcttcagtgaagatgtcctgtaaggcttctggatacccattcactgactactatatgaactgggtgaagcagagccatgggaggagccttgactggattggagtttttaatccttaccagggtgatactaggtacacccagaagttcaaggacaaggccacattgactattgacaagtcctccagcacagcctacatggagctcaacagcctgacatctgaggactctgcagtctattactgtgcaagattaaggctcctctacgatactagtgagtactatgttatggactactggggtcaaggaacctcagtcaccgtctcttca

SEQ ID NO: 453 - DNA, 1434 bp, Artificial Sequence
  source: /note="Description of Artificial Sequence: Synthetic 1F3.1-lambda-5T4IM57_5T4_CL16 (NG to SG) sequence"
ggcggcagcggcggctcccaagccgtggtaacccaggagcccagtctgacagtgagccctggcggtacagtgaccttgacttgcaggagcagtaccggagccgtaactacctcaaactacgccaactgggtgcagcagaagcccggtcaggcccccaggggccttattggtgggactaacaaacgagcacccggaacccccgcaaggttcagcggcagccttctgggcggaaaggccgctctcacattgagcggcgtgcagcccgaggacgaggccgagtactactgcgccctgtggtacagcaacctgtgggtgttcggcggagggaccaagctgaccgtgctgggccagcccaaagctgcgccgagcgtgaccctgttccccccgtcaagcgaggagctgcaggctaacaaggccaccctggtgtgcctgattagtgacttctaccccggtgccgtcaccgtggcctggaaggccgacagtagcccagttaaagcgggcgtcgagaccaccactcccagcaagcagagcaacaacaagtacgccgcgagcagctacctgagtctgacccccgagcagtggaagagccacaggagctacagctgccaggtgacccacgagggcagcactgtggagaagactgtggccccgaccgagtgccccccatgtagcggcggagggtccgaaaatgttctcacccagtctccagcaatcatgtctgcatctccaggggaaaaggtcaccatgacctgcagtgccagctcaagtgtaaattacatgcactggtaccagcagaagtcaaacacctcccccaaactctggatttatgacacatccaaactggcttctggagtcccaggtcgcttcagtggcagtgggtctggaaactcttactctctcacgatcagcagcatggaggctgaagatgttgccacttatttctgttttcaggggagtgggtacccgtacacgttcggaggggggaccaagctggaaataaaaggcggaggtgggagtggcggcggtggtagcggtggcgggggatccggaggaggggggtcagcggtccagctgcaacagtctggacctgtgcgggtgaagcctggggcttcagtgaagatgtcctgtaaggcttctggatacccattcactgactactatatgaactgggtgaagcagagccatgggaggagccttgactggattggagtttttaatccttactccggtgatactaggtacacccagaagttcaaggacaaggccacattgactattgacaagtcctccagcacagcctacatggagctcaacagcctgacatctgaggactctgcagtctattactgtgcaagattaaggctcctctacgatactagtgagtactatgttatggactactggggtcaaggaacctcagtcaccgtctcttca

SEQ ID NO: 454 - DNA, 1434 bp, Artificial Sequence
  source: /note="Description of Artificial Sequence: Synthetic 1F3.1-lambda-5T4IM58_5T4_CL16 (NG to NA) sequence"
ggcggcagcggcggctcccaagccgtggtaacccaggagcccagtctgacagtgagccctggcggtacagtgaccttgacttgcaggagcagtaccggagccgtaactacctcaaactacgccaactgggtgcagcagaagcccggtcaggcccccaggggccttattggtgggactaacaaacgagcacccggaacccccgcaaggttcagcggcagccttctgggcggaaaggccgctctcacattgagcggcgtgcagcccgaggacgaggccgagtactactgcgccctgtggtacagcaacctgtgggtgttcggcggagggaccaagctgaccgtgctgggccagcccaaagctgcgccgagcgtgaccctgttccccccgtcaagcgaggagctgcaggctaacaaggccaccctggtgtgcctgattagtgacttctaccccggtgccgtcaccgtggcctggaaggccgacagtagcccagttaaagcgggcgtcgagaccaccactcccagcaagcagagcaacaacaagtacgccgcgagcagctacctgagtctgacccccgagcagtggaagagccacaggagctacagctgccaggtgacccacgagggcagcactgtggagaagactgtggccccgaccgagtgccccccatgtagcggcggagggtccgaaaatgttctcacccagtctccagcaatcatgtctgcatctccaggggaaaaggtcaccatgacctgcagtgccagctcaagtgtaaattacatgcactggtaccagcagaagtcaaacacctcccccaaactctggatttatgacacatccaaactggcttctggagtcccaggtcgcttcagtggcagtgggtctggaaactcttactctctcacgatcagcagcatggaggctgaagatgttgccacttatttctgttttcaggggagtgggtacccgtacacgttcggaggggggaccaagctggaaataaaaggcggaggtgggagtggcggcggtggtagcggtggcgggggatccggaggaggggggtcagcggtccagctgcaacagtctggacctgtgcgggtgaagcctggggcttcagtgaagatgtcctgtaaggcttctggatacccattcactgactactatatgaactgggtgaagcagagccatgggaggagccttgactggattggagtttttaatccttacaacgccgatactaggtacacccagaagttcaaggacaaggccacattgactattgacaagtcctccagcacagcctacatggagctcaacagcctgacatctgaggactctgcagtctattactgtgcaagattaaggctcctctacgatactagtgagtactatgttatggactactggggtcaaggaacctcagtcaccgtctcttca

SEQ ID NO: 455 - DNA, 1434 bp, Artificial Sequence; identical to SEQ ID NO: 439
  source: /note="Description of Artificial Sequence: Synthetic 1F3.1-lambda-5T4IM53_HuCL16-13 (BM7) sequence"

SEQ ID NO: 456 - DNA, 2181 bp, Artificial Sequence
  source: /note="Description of Artificial Sequence: Synthetic LC h1F3.1-lambda-bi-NKG2A_Sc(L-H) sequence"
ggcggcagcggcggctcccaagccgtggtaacccaggagcccagtctgacagtgagccctggcggtacagtgaccttgacttgcaggagcagtaccggagccgtaactacctcaaactacgccaactgggtgcagcagaagcccggtcaggcccccaggggccttattggtgggactaacaaacgagcacccggaacccccgcaaggttcagcggcagccttctgggcggaaaggccgctctcacattgagcggcgtgcagcccgaggacgaggccgagtactactgcgccctgtggtacagcaacctgtgggtgttcggcggagggaccaagctgaccgtgctgggccagcccaaagctgcgccgagcgtgaccctgttccccccgtcaagcgaggagctgcaggctaacaaggccaccctggtgtgcctgattagtgacttctaccccggtgccgtcaccgtggcctggaaggccgacagtagcccagttaaagcgggcgtcgagaccaccactcccagcaagcagagcaacaacaagtacgccgcgagcagctacctgagtctgacccccgagcagtggaagagccacaggagctacagctgccaggtgacccacgagggcagcactgtggagaagactgtggccccgaccgagtgccccccatgtagcggcggagggtccgacatccagatgacacagtctccctcttccctgtctgcttccgtgggcgatagagtgacaatcacctgtcgcgccagcgagaacatctactcttatctggcttggtaccagcagaagcccggcaaggcccctaagctgctgatctataatgccaagacactggctgagggcgtgccttccaggttcagcggatctggatccggaaccgactttacactgaccatcagctctctgcagccagaggattttgccacatactattgccagcatcattacggaacaccaagaacattcggcgggggaacaaaagtggaaatcaagggcggaggcgggtctggaggtggagggagtggaggaggggggagccaggtccagctggtgcagtcaggagccgaggtgaagaagccaggggcatcagtcaaggtgtcatgtaaagcatcaggttatacttttacctcctactggatgaactgggtgaggcaggctccaggacagggcctggagtggatgggaaggatcgacccctacgatagcgagacacactatgctcagaagctgcagggcagagtgaccatgaccacagacacctccacaagcaccgcctatatggagctgaggagcctgcggtctgacgataccgccgtgtactattgcgctcgcggcggctacgacttcgatgtgggcacactgtattggttctttgacgtgtggggccagggcaccacagtgaccgtgtccagcggtggtggtggtagtgatatccaaatgactcaatccccttcttctctgtccgcctctgtcggcgacagagtgaccatcacctgtcgggcttctgagaacatctactcctacctggcttggtaccagcagaaaccaggcaaggcccccaagctgctgatctacaacgccaagaccctggccgagggcgtgccctcccgcttctccggctctgggtctggcaccgattttacactgaccatctccagcctgcagcctgaggacttcgccacctactactgccagcaccactacggcacacctagaacctttggcggcggcaccaaggtggaaatcaagggcggaggcggatctggcggaggtggctccggaggcggaggcagccaggtgcagctggtgcagtccggcgctgaggtgaagaagcctggcgcctccgtgaaagtgtcttgcaaggcttctggctacaccttcacaagctattggatgaactgggtccggcaggctcctggacagggcctggaatggatgggccggatcgatccttacgactccgagacccattacgcccagaagctccaaggcagagtgaccatgaccaccgacacaagcacctccaccgcttacatggaactgcggtccctgagatccgacgacaccgccgtgtactattgcgccagaggcggctacgacttcgacgtgggcaccctgtactggttcttcgatgtgtggggccagggcaccacagttaccgtgtcctct

SEQ ID NO: 457 - protein, 231 aa, Artificial Sequence
  source: /note="Description of Artificial Sequence: Synthetic polypeptide"
EVQLVESGGGLVQPGGSLRLSCAASGFTFNTYAMNWVRQAPGKGLEWVARIRSKYNNYATYYADSVKDRFTISRDDSKNTLYLQMNSLRAEDTAVYYCVRHGNFGNSYVSWFAYWGQGTMVTVSSASTKGPSVFPLAPSSKSTSGGTAALGCLVKDYFPEPVTVSWNSGALTSGVHTFPAVLQSSGLYSLSSVVTVPSSSLGTQTYICNVNHKPSNTKVDKRVEPKSCPPC

SEQ ID NO: 458 - protein, 9 aa, Artificial Sequence
  source: /note="Description of Artificial Sequence: Synthetic peptide"
FTFNTYAMN

SEQ ID NO: 459 - protein, 16 aa, Artificial Sequence
  source: /note="Description of Artificial Sequence: Synthetic peptide"
WVARIRSKYNNYATYY

SEQ ID NO: 460 - protein, 15 aa, Artificial Sequence
  source: /note="Description of Artificial Sequence: Synthetic peptide"
RHGNFGNSYVSWFAY

SEQ ID NO: 461 - protein, 217 aa, Artificial Sequence
  source: /note="Description of Artificial Sequence: Synthetic polypeptide"
QAVVTQEPSLTVSPGGTVTLTCRSSTGAVTTSNYANWVQQKPGQAPRGLIGGTNKRAPGTPARFSGSLLGGKAALTLSGVQPEDEAEYYCALWYSNLWVFGGGTKLTVLGQPKAAPSVTLFPPSSEELQANKATLVCLISDFYPGAVTVAWKADSSPVKAGVETTTPSKQSNNKYAASSYLSLTPEQWKSHRSYSCQVTHEGSTVEKTVAPTECPPC

SEQ ID NO: 462 - protein, 11 aa, Artificial Sequence
  source: /note="Description of Artificial Sequence: Synthetic peptide"
TGAVTTSNYAN

SEQ ID NO: 463 - protein, 16 aa, Artificial Sequence
  source: /note="Description of Artificial Sequence: Synthetic peptide"
GQAPRGLIGGTNKRAP

SEQ ID NO: 464 - protein, 8 aa, Artificial Sequence
  source: /note="Description of Artificial Sequence: Synthetic peptide"
ALWYSNLW

SEQ ID NO: 465 - protein, 124 aa, Artificial Sequence
  source: /note="Description of Artificial Sequence: Synthetic polypeptide"
EVQLVESGGGLVQPGGSLRLSCAASGFTFNTYAMNWVRQAPGKGLEWVARIGSGGNGYATYYADSVKDRFTISRDDSKNTLYLQMNSLRAEDTAVYYCVRHGNFGASARSWFAYWGQGTMVTVS

SEQ ID NO: 466 - protein, 217 aa, Artificial Sequence
  source: /note="Description of Artificial Sequence: Synthetic polypeptide"
QAVVTQEPSLTVSPGGTVTLTCRSSTGAVTRGNAANWVQQKPGQAPRGLIGGTNARAPGTPARFSGSLLGGKAALTLSGVQPEDEAEYYCALGYSGLWVFGGGTKLTVLGQPKAAPSVTLFPPSSEELQANKATLVCLISDFYPGAVTVAWKADSSPVKAGVETTTPSKQSNNKYAASSYLSLTPEQWKSHRSYSCQVTHEGSTVEKTVAPTECPPC

SEQ ID NO: 467 - protein, 231 aa, Artificial Sequence
  source: /note="Description of Artificial Sequence: Synthetic polypeptide"
EVQLVESGGGLVQPGGSLRLSCAASGFTFNGGSGGWVRQAPGKGLEWVAGGGSGGGGSGGGSGGSGGGRFTISRDDSKNTLYLQMNSLRAEDTAVYYCVRGGGSGGSGGSGGGGWGQGTMVTVSSASTKGPSVFPLAPSSKSTSGGTAALGCLVKDYFPEPVTVSWNSGALTSGVHTFPAVLQSSGLYSLSSVVTVPSSSLGTQTYICNVNHKPSNTKVDKRVEPKSCPPC

SEQ ID NO: 468 - protein, 217 aa, Artificial Sequence
  source: /note="Description of Artificial Sequence: Synthetic polypeptide"
QAVVTQEPSLTVSPGGTVTLTCGSSGGGSGGGGSGGWVQQKPGQAPRGLIGGGSGGGSGTPARFSGSLLGGKAALTLSGVQPEDEAEYYCGGGGSGGGGFGGGTKLTVLGQPKAAPSVTLFPPSSEELQANKATLVCLISDFYPGAVTVAWKADSSPVKAGVETTTPSKQSNNKYAASSYLSLTPEQWKSHRSYSCQVTHEGSTVEKTVAPTECPPC

SEQ ID NO: 469 - protein, 11 aa, Artificial Sequence
  source: /note="Description of Artificial Sequence: Synthetic peptide"
GSVSSGDYYWT

SEQ ID NO: 470 - protein, 13 aa, Artificial Sequence
  source: /note="Description of Artificial Sequence: Synthetic peptide"
WIGHIYYSGNTNY

SEQ ID NO: 471 - protein, 11 aa, Artificial Sequence
  source: /note="Description of Artificial Sequence: Synthetic peptide"
VRDRVTGAFDI

SEQ ID NO: 472 - protein, 8 aa, Artificial Sequence
  source: /note="Description of Artificial Sequence: Synthetic peptide"
QDISNYLN

SEQ ID NO: 473 - protein, 11 aa, Artificial Sequence
  source: /note="Description of Artificial Sequence: Synthetic peptide"
LLIYDASNLET

SEQ ID NO: 474 - protein, 8 aa, Artificial Sequence
  source: /note="Description of Artificial Sequence: Synthetic peptide"
QHFDHLPL

SEQ ID NO: 475 - protein, 118 aa, Artificial Sequence
  source: /note="Description of Artificial Sequence: Synthetic polypeptide"
QVQLVQSGAEVKKPGASVKVSCKASGYTFTSFWMHWVRQAPGQGLEWMGRIDPNRGGTEYNEKAKSRVTMTADKSTSTAYMELSSLRSEDTAVYYCAGGNPYYPMDYWGQGTTVTVSS

SEQ ID NO: 476 - protein, 9 aa, Artificial Sequence
  source: /note="Description of Artificial Sequence: Synthetic peptide"
YTFTSFWMH

SEQ ID NO: 477 - protein, 14 aa, Artificial Sequence
  source: /note="Description of Artificial Sequence: Synthetic peptide"
WMGRIDPNRGGTEY

SEQ ID NO: 478 - protein, 10 aa, Artificial Sequence
  source: /note="Description of Artificial Sequence: Synthetic peptide"
GGNPYYPMDY

SEQ ID NO: 479 - protein, 107 aa, Artificial Sequence
  source: /note="Description of Artificial Sequence: Synthetic polypeptide"
DIQMTQSPSSLSASVGDRVTITCRASQGISNYLAWFQQKPGKAPKSLIYRANRLQSGVPSRFSGSGSGTDFTLTISSLQPEDVATYYCLQYDDFPWTFGQGTKLEIK

SEQ ID NO: 480 - protein, 8 aa, Artificial Sequence
  source: /note="Description of Artificial Sequence: Synthetic peptide"
QGISNYLA

SEQ ID NO: 481 - protein, 11 aa, Artificial Sequence
  source: /note="Description of Artificial Sequence: Synthetic peptide"
SLIYRANRLQS

SEQ ID NO: 482 - protein, 8 aa, Artificial Sequence
  source: /note="Description of Artificial Sequence: Synthetic peptide"
LQYDDFPW

SEQ ID NO: 483 - protein, 124 aa, Artificial Sequence
  source: /note="Description of Artificial Sequence: Synthetic polypeptide"
AVQLQQSGPVRVKPGASVKMSCKASGYPFTDYYMNWVKQSHGRSLDWIGVFNPYNGDTRYTQKFKDKATLTIDKSSSTAYMELNSLTSEDSAVYYCARLRLLYDTSEYYVMDYWGQGTSVTVSS

SEQ ID NO: 484 - protein, 9 aa, Artificial Sequence
  source: /note="Description of Artificial Sequence: Synthetic peptide"
YPFTDYYMN

SEQ ID NO: 485 - protein, 15 aa, Artificial Sequence
  source: /note="Description of Artificial Sequence: Synthetic peptide"
WIGVFNPYNGDTRYT

SEQ ID NO: 486 - protein, 16 aa, Artificial Sequence
  source: /note="Description of Artificial Sequence: Synthetic peptide"
RLRLLYDTSEYYVMDY

SEQ ID NO: 487 - protein, 106 aa, Artificial Sequence
  source: /note="Description of Artificial Sequence: Synthetic polypeptide"
ENVLTQSPAIMSASPGEKVTMTCSASSSVNYMHWYQQKSNTSPKLWIYDTSKLASGVPGRFSGSGSGNSYSLTISSMEAEDVATYFCFQGSGYPYTFGGGTKLEIK

SEQ ID NO: 488 - protein, 7 aa, Artificial Sequence
  source: /note="Description of Artificial Sequence: Synthetic peptide"
SSVNYMH

SEQ ID NO: 489 - protein, 11 aa, Artificial Sequence
  source: /note="Description of Artificial Sequence: Synthetic peptide"
LWIYDTSKLAS

SEQ ID NO: 490 - protein, 8 aa, Artificial Sequence
  source: /note="Description of Artificial Sequence: Synthetic peptide"
FQGSGYPY

SEQ ID NO: 491 - protein, 116 aa, Artificial Sequence
  source: /note="Description of Artificial Sequence: Synthetic polypeptide"
QVQLQQSGAELMKPGASVKLACKATGYTFTAYWIEWVKQRPGHGLEWIGEILPGRGSTNSNEKFKGKATFTADTSSNTVYMQLSSLTTEDSAIFYCARGYRDFDYWGQGTTLTVSS

SEQ ID NO: 492 - protein, 9 aa, Artificial Sequence
  source: /note="Description of Artificial Sequence: Synthetic peptide"
YTFTAYWIE

SEQ ID NO: 493 - protein, 14 aa, Artificial Sequence
  source: /note="Description of Artificial Sequence: Synthetic peptide"
WIGEILPGRGSTNS

SEQ ID NO: 494 - protein, 8 aa, Artificial Sequence
  source: /note="Description of Artificial Sequence: Synthetic peptide"
RGYRDFDY

SEQ ID NO: 495 - protein, 107 aa, Artificial Sequence
  source: /note="Description of Artificial Sequence: Synthetic polypeptide"
DIVMTQSQKFMSTTVGDRVSIICKASQNVGTAVAWYQQKPGQSPKVLIYSASNRYTGVPDRFTGSGSGTDFTLTISNMQSEDLADYFCQQYTSYPRTFGGGTKLEIK

SEQ ID NO: 496 - protein, 8 aa, Artificial Sequence
  source: /note="Description of Artificial Sequence: Synthetic peptide"
QNVGTAVA

SEQ ID NO: 497 - protein, 11 aa, Artificial Sequence
  source: /note="Description of Artificial Sequence: Synthetic peptide"
VLIYSASNRYT

SEQ ID NO: 498 - protein, 8 aa, Artificial Sequence
  source: /note="Description of Artificial Sequence: Synthetic peptide"
QQYTSYPR

SEQ ID NO: 499 - protein, 116 aa, Artificial Sequence
  source: /note="Description of Artificial Sequence: Synthetic polypeptide"
QVQLQQSGAELMKPGASVKLSCKATGYTFTGYWIEWVKQRPGHGLEWIGEILPGRDSTNSNEKFKGKATFTADTSSNTVYMQLSSLTTEDSAIFYCARGYRDFDYWGQGTTLTVSS

SEQ ID NO: 500 - protein, 9 aa, Artificial Sequence
  source: /note="Description of Artificial Sequence: Synthetic peptide"
YTFTGYWIE

SEQ ID NO: 501 - protein, 14 aa, Artificial Sequence
  source: /note="Description of Artificial Sequence: Synthetic peptide"
WIGEILPGRDSTNS

SEQ ID NO: 502 - protein, 8 aa, Artificial Sequence
  source: /note="Description of Artificial Sequence: Synthetic peptide"
RGYRDFDY

SEQ ID NO: 503 - protein, 107 aa, Artificial Sequence
  source: /note="Description of Artificial Sequence: Synthetic polypeptide"
DIVMTQSQKFMSTTVGDRVSIICKASQNVGTAVAWYQQKPGQSPKVLIYSASNRYTGVPDRFTGSGSGTDFTLTISNMQSEDLADYFCQQYSSYPRTFGGGTKLEIK

SEQ ID NO: 504 - protein, 8 aa, Artificial Sequence
  source: /note="Description of Artificial Sequence: Synthetic peptide"
QNVGTAVA

SEQ ID NO: 505 - protein, 11 aa, Artificial Sequence
  source: /note="Description of Artificial Sequence: Synthetic peptide"
VLIYSASNRYT

SEQ ID NO: 506 - protein, 8 aa, Artificial Sequence
  source: /note="Description of Artificial Sequence: Synthetic peptide"
QQYSSYPR

SEQ ID NO: 507 - protein, 128 aa, Artificial Sequence
  source: /note="Description of Artificial Sequence: Synthetic polypeptide"
EVQLVESGGGLVQPKGSLQLSCAASGFTFNTYAMHWVRQAPGKGLEWVARIRSKSSNYATYYADSVKDRFTISRDDSQSMLYLQMNNLKTEDTAMYYCVRDGDYYYGSRPSYWYFDVWGTGTTVTVSS

SEQ ID NO: 508 - protein, 9 aa, Artificial Sequence
  source: /note="Description of Artificial Sequence: Synthetic peptide"
FTFNTYAMH

SEQ ID NO: 509 - protein, 16 aa, Artificial Sequence
  source: /note="Description of Artificial Sequence: Synthetic peptide"
WVARIRSKSSNYATYY

SEQ ID NO: 510 - protein, 18 aa, Artificial Sequence
  source: /note="Description of Artificial Sequence: Synthetic peptide"
RDGDYYYGSRPSYWYFDV

SEQ ID NO: 511 - protein, 107 aa, Artificial Sequence
  source: /note="Description of Artificial Sequence: Synthetic polypeptide"
DILLTQSPAILSVSPGERVSFSCRASQSIGTNIHWYQQRTNGSPRLLIKYASESISGIPSRFSGSGSGTDFTLSINNVESEDIADYYCQQTNTWPLTFGAGTKLDLK

SEQ ID NO: 512 - protein, 8 aa, Artificial Sequence
  source: /note="Description of Artificial Sequence: Synthetic peptide"
QSIGTNIH

SEQ ID NO: 513 - protein, 11 aa, Artificial Sequence
  source: /note="Description of Artificial Sequence: Synthetic peptide"
LLIKYASESIS

SEQ ID NO: 514 - protein, 8 aa, Artificial Sequence
  source: /note="Description of Artificial Sequence: Synthetic peptide"
QQTNTWPL

SEQ ID NO: 515 - protein, 120 aa, Artificial Sequence
  source: /note="Description of Artificial Sequence: Synthetic polypeptide"
EVQLVESGGGLVKPGGSLKLSCAASGFTFSNYVMSWVRQTPEKRLEWVATISDRGSYTYYPDYVKGRFTISRDNAKNNLYLQMSHLKSEDTAMYYCARASYYSNLGFAYWGQGTLVTVSA

SEQ ID NO: 516 - protein, 9 aa, Artificial Sequence
  source: /note="Description of Artificial Sequence: Synthetic peptide"
FTFSNYVMS

SEQ ID NO: 517 - protein, 14 aa, Artificial Sequence
  source: /note="Description of Artificial Sequence: Synthetic peptide"
WVATISDRGSYTYY

SEQ ID NO: 518 - protein, 12 aa, Artificial Sequence
  source: /note="Description of Artificial Sequence: Synthetic peptide"
RASYYSNLGFAY

SEQ ID NO: 519 - protein, 113 aa, Artificial Sequence
  source: /note="Description of Artificial Sequence: Synthetic polypeptide"
DIVMSQSPSSLAVSVGEKVTMSCKSSQSLLYSSNQKNYLAWYQQKPGQSPKLLIYWASTRESGVPDRFTGSGSGTDFTLTISSMKAEDLAVYYCQQYYSYPPTFGGGTKLEIK

SEQ ID NO: 520 - protein, 14 aa, Artificial Sequence
  source: /note="Description of Artificial Sequence: Synthetic peptide"
QSLLYSSNQKNYLA

SEQ ID NO: 521 - protein, 11 aa, Artificial Sequence
  source: /note="Description of Artificial Sequence: Synthetic peptide"
LLIYWASTRES

SEQ ID NO: 522 - protein, 8 aa, Artificial Sequence
  source: /note="Description of Artificial Sequence: Synthetic peptide"
QQYYSYPP

SEQ ID NO: 523 - protein, 116 aa, Artificial Sequence
  source: /note="Description of Artificial Sequence: Synthetic polypeptide"
QVQLRQSGAELMKPGASVKLSCKATGYTFTGYWIEWVKQRPGHGLEWIGEILPGRGSSNYNEKFKGKATLTADTSSNTVYMQLSSLTIEDSAIYYCARGGRDFDYWGQGTTLTVSS

SEQ ID NO: 524 - protein, 9 aa, Artificial Sequence
  source: /note="Description of Artificial Sequence: Synthetic peptide"
YTFTGYWIE

SEQ ID NO: 525 - protein, 14 aa, Artificial Sequence
  source: /note="Description of Artificial Sequence: Synthetic peptide"
WIGEILPGRGSSNY

SEQ ID NO: 526 - protein, 8 aa, Artificial Sequence
  source: /note="Description of Artificial Sequence: Synthetic peptide"
RGGRDFDY

SEQ ID NO: 527 - protein, 107 aa, Artificial Sequence
  source: /note="Description of Artificial Sequence: Synthetic polypeptide"
DIQMTQITSSLSASLGDRVTIGCSASQGINNNLNWYQQKPDGTVKLLVYYTSSLHSGVPSRFSGSGSGTDYSLTISNLEPEDIATYYCQQFIKLPYTFGGGTKLEIK

SEQ ID NO: 528 - protein, 8 aa, Artificial Sequence
  source: /note="Description of Artificial Sequence: Synthetic peptide"
QGINNNLN

SEQ ID NO: 529 - protein, 11 aa, Artificial Sequence
  source: /note="Description of Artificial Sequence: Synthetic peptide"
LLVYYTSSLHS

SEQ ID NO: 530 - protein, 8 aa, Artificial Sequence
  source: /note="Description of Artificial Sequence: Synthetic peptide"
QQFIKLPY

SEQ ID NO: 531 - protein, 116 aa, Artificial Sequence
  source: /note="Description of Artificial Sequence: Synthetic polypeptide"
QVQLQQSGGELMKPGASVKLSCKATGYKFTGYWIEWVKQRPGHGLEWIGEILPGRGSTNYNEKFKGKATFTADTSSNTVYMQLSSLTTEDSAIYYCARGGRDFDFWGQGSTLTVSS

SEQ ID NO: 532 - protein, 9 aa, Artificial Sequence
  source: /note="Description of Artificial Sequence: Synthetic peptide"
YKFTGYWIE

SEQ ID NO: 533 - protein, 14 aa, Artificial Sequence
  source: /note="Description of Artificial Sequence: Synthetic peptide"
WIGEILPGRGSTNY

SEQ ID NO: 534 - protein, 8 aa, Artificial Sequence
  source: /note="Description of Artificial Sequence: Synthetic peptide"
RGGRDFDF

SEQ ID NO: 535 - protein, 107 aa, Artificial Sequence
  source: /note="Description of Artificial Sequence: Synthetic polypeptide"
DIQMTQTTSSLSASLGDRVTISCSASQGINSNLNWYQQKPDGTVKLLIYYTSSLHSGVPSRFSGSGSGTDYSLTISNLEPEDIATYYCQQYNKLPYTFGGGTKLEIK

SEQ ID NO: 536 - protein, 8 aa, Artificial Sequence
  source: /note="Description of Artificial Sequence: Synthetic peptide"
QGINSNLN

SEQ ID NO: 537 - protein, 11 aa, Artificial Sequence
  source: /note="Description of Artificial Sequence: Synthetic peptide"
LLIYYTSSLHS

SEQ ID NO: 538 - protein, 8 aa, Artificial Sequence
  source: /note="Description of Artificial Sequence: Synthetic peptide"
QQYNKLPY

SEQ ID NO: 539 - protein, 119 aa, Artificial Sequence
  source: /note="Description of Artificial Sequence: Synthetic polypeptide"
EVQLRQSGPVLVKPGASLKMSCKASGFTIADYYMTWVTQSHGQSLDWIGLINPYSGETTYNQKFKGKATLSVDKSSNTAYMDLNSLTSEDSAVYYCARWRLGYYAMDYWGRGTSVTVSS

SEQ ID NO: 540 - protein, 9 aa, Artificial Sequence
  source: /note="Description of Artificial Sequence: Synthetic peptide"
FTIADYYMT

SEQ ID NO: 541 - protein, 14 aa, Artificial Sequence
  source: /note="Description of Artificial Sequence: Synthetic peptide"
WIGLINPYSGETTY

SEQ ID NO: 542 - protein, 11 aa, Artificial Sequence
  source: /note="Description of Artificial Sequence: Synthetic peptide"
RWRLGYYAMDY

SEQ ID NO: 543 - protein, 106 aa, Artificial Sequence
  source: /note="Description of Artificial Sequence: Synthetic polypeptide"
ENVLTQSPAIMSASPGEKVTMTCSASSSVSYMHWYQQKSSTSPKVWIYDTSKLASGVPGRFSGSGSGNSYSLTISSMEAEDVATYYCFQGIGYPYTFGGGTKLEIK

SEQ ID NO: 544 - protein, 7 aa, Artificial Sequence
  source: /note="Description of Artificial Sequence: Synthetic peptide"
SSVSYMH

SEQ ID NO: 545 - protein, 11 aa, Artificial Sequence
  source: /note="Description of Artificial Sequence: Synthetic peptide"
VWIYDTSKLAS

SEQ ID NO: 546 - protein, 8 aa, Artificial Sequence
  source: /note="Description of Artificial Sequence: Synthetic peptide"
FQGIGYPY

SEQ ID NO: 547 - protein, 116 aa, Artificial Sequence
  source: /note="Description of Artificial Sequence: Synthetic polypeptide"
QVLLVQSGAEVKKPGASVKVSCKASGYTFTAYHIHWVRQAPGQGLEWMGIILPGRGSTTYAQKFQGRVTMTRDTSTSTVYMELSSLRSEDAAVYYCARGYRDFDYWGQGTLVTVST

SEQ ID NO: 548 - protein, 107 aa, Artificial Sequence
  source: /note="Description of Artificial Sequence: Synthetic polypeptide"
EIVLTQSPATLSLSPGERATLSCKASQNVGTAVAWYQQKPGQAPRLLIYSASNRYTGIPARFSGSGSGTDFTLTISSLEPEDFAVYYCQQYTSYPRTFGGGTKVEIK

SEQ ID NO: 549 - protein, 116 aa, Artificial Sequence; identical to SEQ ID NO: 547
  source: /note="Description of Artificial Sequence: Synthetic polypeptide"

SEQ ID NO: 550 - protein, 107 aa, Artificial Sequence
  source: /note="Description of Artificial Sequence: Synthetic polypeptide"
EIVLTQSPATLSLSPGERATLSCKASQNVGTAVAWYQQKPGQTPRLLIYSASNRYTGIPARFSGSGSGTDFTLTISSLEPEDFAVYYCQQYTSYPRTFGQGTRLEIK

SEQ ID NO: 551 - protein, 116 aa, Artificial Sequence
  source: /note="Description of Artificial Sequence: Synthetic polypeptide"
QVQLVQSGAEVRKPGASVRVSCKASGYTFTAYYMHWVRKAPGQGLEWLGRILPGRGSTMYAEKFQGRVTMTRDTSTSTDYMELSSLRSEDTAVYYCARGYRDFDYWGQGTLVTVSS

SEQ ID NO: 552 - protein, 107 aa, Artificial Sequence
  source: /note="Description of Artificial Sequence: Synthetic polypeptide"
EKVMTQSPATLSVSPGERATLSCKASQNVGTAVAWYQQRPGQAPSLLIYSASNRYTGIPARFSGSGSGTEFTLTISSLQSEDFAVYYCQQYTSYPRTFGQGTRVDIK

SEQ ID NO: 553 - protein, 116 aa, Artificial Sequence
  source: /note="Description of Artificial Sequence: Synthetic polypeptide"
QVQLVQSGPEVKKPGASVRVSCRASGYTFTAYYMHWVRQAPGQGLEWVGRILPGRGSTMYAEKFQGRVTLTRDTSTSTDYMDLSSLKSDDTAIYYCTRGYRDFDYWGQGTTVTVSS

SEQ ID NO: 554 - protein, 107 aa, Artificial Sequence; identical to SEQ ID NO: 548
  source: /note="Description of Artificial Sequence: Synthetic polypeptide"

SEQ ID NO: 555 - protein, 116 aa, Artificial Sequence
  source: /note="Description of Artificial Sequence: Synthetic polypeptide"
QMHLVQSGAEVKKPGASVKVSCKPSGYTFTAYYIHWLRQAPGQGLEWVGWILPGRGSTNYAQKFQGRVTMTRDTSISTAYMELASLRSDDTAVYYCARGYRDFDYWGQGTLVTISS

SEQ ID NO: 556 - protein, 107 aa, Artificial Sequence; identical to SEQ ID NO: 550
  source: /note="Description of Artificial Sequence: Synthetic polypeptide"

SEQ ID NO: 557 - protein, 124 aa, Artificial Sequence
  source: /note="Description of Artificial Sequence: Synthetic polypeptide"
QVQLLESGAEVKKPGASVKVSCKASGYPFTDYYMHWVRQAPGQGLEWMGWINPYNGDTTYAQKFQGRVTMTRDTSTSTVYMEVSSLRSDDTAVYYCARLRLLYDTSEYYVMDYWGQGTLVTVSS

SEQ ID NO: 558 - protein, 106 aa, Artificial Sequence
  source: /note="Description of Artificial Sequence: Synthetic polypeptide"
DIQMTQSPSSLSASVGDRVTITCSASSSVNYMHWFQQKPGKAPKPLIYDTSKLASGVPPKFSGSGSGTDFTLTISSLQPDDFATYYCFQGSGYPYTFGRGTKLEIK

SEQ ID NO: 559 - protein, 124 aa, Artificial Sequence
  source: /note="Description of Artificial Sequence: Synthetic polypeptide"
QVQLLASGAEVKKPGASVTVSCKASGYPFTDYYLHWVRQAPGQGLEWMGWINPYNGDTNYAPKFHGRVTMTRDTSISTAYMELSRLRSDDTAIYYCARLRLLYDTSEYYVMDYWGQGTTVTVSA

SEQ ID NO: 560 - protein, 106 aa, Artificial Sequence; identical to SEQ ID NO: 558
  source: /note="Description of Artificial Sequence: Synthetic polypeptide"

SEQ ID NO: 561 - protein, 124 aa, Artificial Sequence
  source: /note="Description of Artificial Sequence: Synthetic polypeptide"
QVQLLESGAEVKKPGASVKVSCKASGYPFTDYYLHWVRQAPGQGLEWMGWINPYNGDTNYAQKFQGRVTMTRDTSISTAYMELSRLRSDDTAVYYCARLRLLYDTSEYYVMDYWGQGTLVTVSS

SEQ ID NO: 562 - protein, 106 aa, Artificial Sequence; identical to SEQ ID NO: 558
  source: /note="Description of Artificial Sequence: Synthetic polypeptide"

SEQ ID NO: 563 - protein, 124 aa, Artificial Sequence
  source: /note="Description of Artificial Sequence: Synthetic polypeptide"
QVQLVQSGAEVKKPGASVKVSCKASGYPFTDYYIHWVRQAPGQGLQWMGWINPYNGDTNFAVKFQGWVTVTRDTSISTVYMGLRGLGSDDTAMYYCARLRLLYDTSEYYVMDYWGPGTTVTVSS

SEQ ID NO: 564 - protein, 106 aa, Artificial Sequence; identical to SEQ ID NO: 558
  source: /note="Description of Artificial Sequence: Synthetic polypeptide"

SEQ ID NO: 565 - protein, 124 aa, Artificial Sequence
  source: /note="Description of Artificial Sequence: Synthetic polypeptide"
EVQLVESGGGLVKPGESLRLSCAASGYPFTDYSMNWVRQAPGKGLEWISYINPYNGDIYDADSVKGRFTTSRDNARNSLYLQMNSLTAEDTAVYFCARLRLLYDTSEYYVMDYWGKGDLVTVSS

SEQ ID NO: 566 - protein, 106 aa, Artificial Sequence; identical to SEQ ID NO: 558
  source: /note="Description of Artificial Sequence: Synthetic polypeptide"

SEQ ID NO: 567 - protein, 116 aa, Artificial Sequence
  source: /note="Description of Artificial Sequence: Synthetic polypeptide"
QMQLVQSGSEVKKPGTSGKVSCKSSGYTFTAYAMQWVRQARGQGLEWIGRILPGRGSTNYAQIFRERVTITRNMSTSTSYMQLKSLRSEDTAVYYCAAGYRDFDYWGKGTVVTVSS

SEQ ID NO: 568 - protein, 107 aa, Artificial Sequence; identical to SEQ ID NO: 548
  source: /note="Description of Artificial Sequence: Synthetic polypeptide"

SEQ ID NO: 569 - protein, 116 aa, Artificial Sequence
  source: /note="Description of Artificial Sequence: Synthetic polypeptide"
QVQLVQSGAEVKKPGASVKLTCTASGYTFTAYYMHWMRQAPGQGLEWMGIVLPGRGSTNYAQKFQGRVTVTRDTSTNTVYMELNSLTSEDTAVYYCVRGYRDFDYWGPGTLVTVSS

SEQ ID NO: 570 - protein, 107 aa, Artificial Sequence
  source: /note="Description of Artificial Sequence: Synthetic polypeptide"
ELVLTQSPATLSLSPGERATLSCKASQNVGTAVAWYQQKPGQAPRLLIYSASNRYTGIPARFSGSGSGTDFTLTVSSLEPEDFAVYYCQQYTSYPRTFGQGTKVEIK

SEQ ID NO: 571 - protein, 124 aa, Artificial Sequence; identical to SEQ ID NO: 559
  source: /note="Description of Artificial Sequence: Synthetic polypeptide"

SEQ ID NO: 572 - protein, 106 aa, Artificial Sequence
  source: /note="Description of Artificial Sequence: Synthetic polypeptide"
DIQMTQSPSRLSASIGDRVTITCSASSSVNYMHWYQQKPRKAPKLLIHDTSKLASDVPSRFSGGASGTEFTLTIDGLQPDDFATYFCFQGSGYPYTFGQGTNVEIQ

SEQ ID NO: 573 - protein, 124 aa, Artificial Sequence
  source: /note="Description of Artificial Sequence: Synthetic polypeptide"
QVQLVQSGAEVKKPGASVKVSCKASGYPFTDYGISWVRQAPGQRLEWMGWINPYNGDTHYAQRFQGRVAMTTDTSMNTAYLELRSLKSDDAAVYYCVRLRLLYDTSEYYVMDYWGQGTLVTVSS

SEQ ID NO: 574 - protein, 106 aa, Artificial Sequence; identical to SEQ ID NO: 558
  source: /note="Description of Artificial Sequence: Synthetic polypeptide"

SEQ ID NO: 575 - protein, 124 aa, Artificial Sequence
  source: /note="Description of Artificial Sequence: Synthetic polypeptide"
AVQLVQSGAEVKKPGASVKVSCKASGYTFTDYYMNWVRQAPGQGLEWMGVFNPYNGDTRYTQKFKDRVTMTRDTSTSTVYMELSSLRSEDTAVYYCARLRLLYDTSEYYVMDYWGQGTTVTVSS

SEQ ID NO: 576 - protein, 106 aa, Artificial Sequence
  source: /note="Description of Artificial Sequence: Synthetic polypeptide"
EIVLTQSPATLSLSPGERATLSCSASSSVNYMHWYQQKPGQAPRLLIYDTSKLASGIPARFSGSGSGTDFTLTISSLEPEDFAVYYCFQGSGYPYTFGGGTKVEIK

SEQ ID NO: 577 - protein, 124 aa, Artificial Sequence
  source: /note="Description of Artificial Sequence: Synthetic polypeptide"
AVQLVQSGAEVKKPGASVKVSCKASGYTFTDYYMNWVRQAPGQGLEWMGVFNPYNGDTRYTQKFKDKVTMTIDKSTSTVYMELNSLRSEDTAVYYCARLRLLYDTSEYYVMDYWGQGTTVTVSS

SEQ ID NO: 578 - protein, 106 aa, Artificial Sequence; identical to SEQ ID NO: 576
  source: /note="Description of Artificial Sequence: Synthetic polypeptide"

SEQ ID NO: 579 - protein, 124 aa, Artificial Sequence
  source: /note="Description of Artificial Sequence: Synthetic polypeptide"
AVQLVQSGAEVKKPGASVKVSCKASGYTFTDYYMNWVRQAPGRGLEWMGVFNPYNGDTRYTQKFKDKVTLTIDKSTSTVYMELNSLRSEDTAVYYCARLRLLYDTSEYYVMDYWGQGTTVTVSS

SEQ ID NO: 580 - protein, 106 aa, Artificial Sequence; identical to SEQ ID NO: 576
  source: /note="Description of Artificial Sequence: Synthetic polypeptide"

SEQ ID NO: 581 - protein, 124 aa, Artificial Sequence
  source: /note="Description of Artificial Sequence: Synthetic polypeptide"
AVQLVQSGAEVKKPGASVKVSCKASGYTFTDYYMNWVKQAPGRGLEWMGVFNPYNGDTRYTQKFKDKATLTIDKSTSTVYMELNSLRSEDTAVYYCARLRLLYDTSEYYVMDYWGQGTTVTVSS

SEQ ID NO: 582 - protein, 106 aa, Artificial Sequence; identical to SEQ ID NO: 576
  source: /note="Description of Artificial Sequence: Synthetic polypeptide"

SEQ ID NO: 583 - protein, 124 aa, Artificial Sequence; identical to SEQ ID NO: 575
  source: /note="Description of Artificial Sequence: Synthetic polypeptide"

SEQ ID NO: 584 - protein, 106 aa, Artificial Sequence
  source: /note="Description of Artificial Sequence: Synthetic polypeptide"
ENVLTQSPATLSLSPGERATLSCSASSSVNYMHWYQQKPGQAPRLLIYDTSKLASGIPARFSGSGSGNDFTLTISSLEPEDFAVYYCFQGSGYPYTFGGGTKVEIK

SEQ ID NO: 585 - protein, 124 aa, Artificial Sequence; identical to SEQ ID NO: 577
  source: /note="Description of Artificial Sequence: Synthetic polypeptide"

SEQ ID NO: 586 - protein, 106 aa, Artificial Sequence; identical to SEQ ID NO: 584
  source: /note="Description of Artificial Sequence: Synthetic polypeptide"

SEQ ID NO: 587 - protein, 124 aa, Artificial Sequence; identical to SEQ ID NO: 579
  source: /note="Description of Artificial Sequence: Synthetic polypeptide"

SEQ ID NO: 588 - protein, 106 aa, Artificial Sequence; identical to SEQ ID NO: 584
  source: /note="Description of Artificial Sequence: Synthetic polypeptide"

SEQ ID NO: 589 - protein, 124 aa, Artificial Sequence; identical to SEQ ID NO: 581
  source: /note="Description of Artificial Sequence: Synthetic polypeptide"

SEQ ID NO: 590 - protein, 106 aa, Artificial Sequence; identical to SEQ ID NO: 584
  source: /note="Description of Artificial Sequence: Synthetic polypeptide"

SEQ ID NO: 591 - protein, 124 aa, Artificial Sequence; identical to SEQ ID NO: 575
  source: /note="Description of Artificial Sequence: Synthetic polypeptide"

SEQ ID NO: 592 - protein, 106 aa, Artificial Sequence
  source: /note="Description of Artificial Sequence: Synthetic polypeptide"
ENVLTQSPATLSLSPGERATLSCSASSSVNYMHWYQQKPGQSPRLLIYDTSKLASGIPARFSGSGSGNDFTLTISSLEPEDFAVYYCFQGSGYPYTFGGGTKVEIK

SEQ ID NO: 593 - protein, 124 aa, Artificial Sequence; identical to SEQ ID NO: 577
  source: /note="Description of Artificial Sequence: Synthetic polypeptide"

SEQ ID NO: 594 - protein, 106 aa, Artificial Sequence; identical to SEQ ID NO: 592
  source: /note="Description of Artificial Sequence: Synthetic polypeptide"

SEQ ID NO: 595 - protein, 124 aa, Artificial Sequence; identical to SEQ ID NO: 579
  source: /note="Description of Artificial Sequence: Synthetic polypeptide"

SEQ ID NO: 596 - protein, 106 aa, Artificial Sequence; identical to SEQ ID NO: 592
  source: /note="Description of Artificial Sequence: Synthetic polypeptide"

SEQ ID NO: 597 - protein, 124 aa, Artificial Sequence; identical to SEQ ID NO: 581
  source: /note="Description of Artificial Sequence: Synthetic polypeptide"

SEQ ID NO: 598 - protein, 106 aa, Artificial Sequence; identical to SEQ ID NO: 592
  source: /note="Description of Artificial Sequence: Synthetic polypeptide"

SEQ ID NO: 599 - protein, 124 aa, Artificial Sequence
  source: /note="Description of Artificial Sequence: Synthetic polypeptide"
QVQLVQSGAEVKKPGASVKVSCKASGYTFTDYYMNWVRQAPGQGLEWMGVFNPYNGDTRYTQKFKDRVTMTRDTSISTAYMELSRLRSDDTAVYYCARLRLLYDTSEYYVMDYWGQGTTVTVSS

SEQ ID NO: 600 - protein, 106 aa, Artificial Sequence; identical to SEQ ID NO: 576
  source: /note="Description of Artificial Sequence: Synthetic polypeptide"

SEQ ID NO: 601 - protein, 124 aa, Artificial Sequence
  source: /note="Description of Artificial Sequence: Synthetic polypeptide"
QVQLVQSGAEVKKPGASVKVSCKASGYTFTDYYMNWVRQAPGQGLEWMGVFNPYNGDTRYTQKFKDRVTMTIDKSISTAYMELSRLRSDDTAVYYCARLRLLYDTSEYYVMDYWGQGTTVTVSS

SEQ ID NO: 602 - protein, 106 aa, Artificial Sequence; identical to SEQ ID NO: 576
  source: /note="Description of Artificial Sequence: Synthetic polypeptide"

SEQ ID NO: 603 - protein, 124 aa, Artificial Sequence
  source: /note="Description of Artificial Sequence: Synthetic polypeptide"
QVQLVQSGAEVKKPGASVKVSCKASGYTFTDYYMNWVRQAPGRGLEWMGVFNPYNGDTRYTQKFKDRVTMTIDKSISTAYMELSRLRSDDTAVYYCARLRLLYDTSEYYVMDYWGQGTTVTVSS

SEQ ID NO: 604 - protein, 106 aa, Artificial Sequence; identical to SEQ ID NO: 576
  source: /note="Description of Artificial Sequence: Synthetic polypeptide"

SEQ ID NO: 605 - protein, 124 aa, Artificial Sequence
  source: /note="Description of Artificial Sequence: Synthetic polypeptide"
QVQLVQSGAEVKKPGASVKVSCKASGYTFTDYYMNWVRQAPGRGLEWIGVFNPYNGDTRYTQKFKDRATLTIDKSISTAYMELSRLRSDDTAVYYCARLRLLYDTSEYYVMDYWGQGTTVTVSS

SEQ ID NO: 606 - protein, 106 aa, Artificial Sequence; identical to SEQ ID NO: 576
  source: /note="Description of Artificial Sequence: Synthetic polypeptide"

SEQ ID NO: 607 - protein, 124 aa, Artificial Sequence
  source: /note="Description of Artificial Sequence: Synthetic polypeptide"
QVQLVQSGAEVKKPGASVKVSCKASGYPFTDYYMNWVRQAPGRGLEWIGVFNPYNGDTRYTQKFKDKATLTIDKSISTAYMELNRLRSDDTAVYYCARLRLLYDTSEYYVMDYWGQGTTVTVSS

SEQ ID NO: 608 - protein, 106 aa, Artificial Sequence; identical to SEQ ID NO: 576
  source: /note="Description of Artificial Sequence: Synthetic polypeptide"

SEQ ID NO: 609 - protein, 124 aa, Artificial Sequence; identical to SEQ ID NO: 599
  source: /note="Description of Artificial Sequence: Synthetic polypeptide"

SEQ ID NO: 610 - protein, 106 aa, Artificial Sequence
  source: /note="Description of Artificial Sequence: Synthetic polypeptide"
ENVLTQSPATLSLSPGERATLSCSASSSVNYMHWYQQKPGQAPRLLIYDTSKLASGIPARFSGSGSGTDYTLTISSLEPEDFAVYYCFQGSGYPYTFGGGTKVEIK

SEQ ID NO: 611 - protein, 124 aa, Artificial Sequence; identical to SEQ ID NO: 601
  source: /note="Description of Artificial Sequence: Synthetic polypeptide"

SEQ ID NO: 612 - protein, 106 aa, Artificial Sequence; identical to SEQ ID NO: 610
  source: /note="Description of Artificial Sequence: Synthetic polypeptide"

SEQ ID NO: 613 - protein, 124 aa, Artificial Sequence; identical to SEQ ID NO: 603
  source: /note="Description of Artificial Sequence: Synthetic polypeptide"

SEQ ID NO: 614 - protein, 106 aa, Artificial Sequence; identical to SEQ ID NO: 610
  source: /note="Description of Artificial Sequence: Synthetic polypeptide"

SEQ ID NO: 615 - protein, 123 aa, Artificial Sequence
  source: /note="Description of Artificial Sequence: Synthetic polypeptide"
QVQLVQSGAEVKKPGASVKVSCKASGYTFTDYYMNWVRQAPGRGLEWIGVFNPYNGDTRYTQKFKDRATLTIDKSISTAYMELSRLRSDDTAVYYCARLRLLYDTSEYYVMDYWGQGTTVTVS

SEQ ID NO: 616 - protein, 106 aa, Artificial Sequence; identical to SEQ ID NO: 610
  source: /note="Description of Artificial Sequence: Synthetic polypeptide"

SEQ ID NO: 617 - protein, 124 aa, Artificial Sequence; identical to SEQ ID NO: 607
  source: /note="Description of Artificial Sequence: Synthetic polypeptide"

SEQ ID NO: 618 - protein, 106 aa, Artificial Sequence; identical to SEQ ID NO: 610
  source: /note="Description of Artificial Sequence: Synthetic polypeptide"

SEQ ID NO: 619 - protein, 124 aa, Artificial Sequence; identical to SEQ ID NO: 599
  source: /note="Description of Artificial Sequence: Synthetic polypeptide"

SEQ ID NO: 620 - protein, 106 aa, Artificial Sequence
  source: /note="Description of Artificial Sequence: Synthetic polypeptide"
ENVLTQSPATLSLSPGERATLSCSASSSVNYMHWYQQKPGQSPRLLIYDTSKLASGIPARFSGSGSGTDYTLTISSLEPEDFAVYFCFQGSGYPYTFGGGTKVEIK

SEQ ID NO: 621 - protein, 124 aa, Artificial Sequence; identical to SEQ ID NO: 601
  source: /note="Description of Artificial Sequence: Synthetic polypeptide"

SEQ ID NO: 622 - protein, 106 aa, Artificial Sequence; identical to SEQ ID NO: 620
  source: /note="Description of Artificial Sequence: Synthetic polypeptide"

SEQ ID NO: 623 - protein, 124 aa, Artificial Sequence; identical to SEQ ID NO: 603
  source: /note="Description of Artificial Sequence: Synthetic polypeptide"

SEQ ID NO: 624 - protein, 106 aa, Artificial Sequence; identical to SEQ ID NO: 620
  source: /note="Description of Artificial Sequence: Synthetic polypeptide"

SEQ ID NO: 625 - protein, 124 aa, Artificial Sequence; identical to SEQ ID NO: 605
  source: /note="Description of Artificial Sequence: Synthetic polypeptide"

SEQ ID NO: 626 - protein, 106 aa, Artificial Sequence; identical to SEQ ID NO: 620
  source: /note="Description of Artificial Sequence: Synthetic polypeptide"

SEQ ID NO: 627 - protein, 124 aa, Artificial Sequence; identical to SEQ ID NO: 607
  source: /note="Description of Artificial Sequence: Synthetic polypeptide"

SEQ ID NO: 628 - protein, 106 aa, Artificial Sequence; identical to SEQ ID NO: 620
  source: /note="Description of Artificial Sequence: Synthetic polypeptide"

SEQ ID NO: 629 - protein, 124 aa, Artificial Sequence
  source: /note="Description of Artificial Sequence: Synthetic polypeptide"
AVQLQQSGPVRVKPGASVKMSCKASGYPFTDYYMNWVKQSHGRSLDWIGVFNPYQGDTRYTQKFKDKATLTIDKSSSTAYMELNSLTSEDSAVYYCARLRLLYDTSEYYVMDYWGQGTSVTVSS

SEQ ID NO: 630 - protein, 106 aa, Artificial Sequence; identical to SEQ ID NO: 487
  source: /note="Description of Artificial Sequence: Synthetic polypeptide"

SEQ ID NO: 631 - protein, 124 aa, Artificial Sequence
  source: /note="Description of Artificial Sequence: Synthetic polypeptide"
AVQLQQSGPVRVKPGASVKMSCKASGYPFTDYYMNWVKQSHGRSLDWIGVFNPYSGDTRYTQKFKDKATLTIDKSSSTAYMELNSLTSEDSAVYYCARLRLLYDTSEYYVMDYWGQGTSVTVSS

SEQ ID NO: 632 - protein, 106 aa, Artificial Sequence; identical to SEQ ID NO: 487
  source: /note="Description of Artificial Sequence: Synthetic polypeptide"

SEQ ID NO: 633 - protein, 123 aa, Artificial Sequence
  source: /note="Description of Artificial Sequence: Synthetic polypeptide"
AVQLQQSGPVRVKPGASVKMSCKASGYPFTDYYMNWVKQSHGRSLDWIGVFNPYNADTRYTQKFKDKATLTIDKSSSTAYMELNSLTSEDSAVYYCARLRLLYDTSEYYVMDYWGQGTSVTVS

SEQ ID NO: 634 - protein, 106 aa, Artificial Sequence; identical to SEQ ID NO: 487
  source: /note="Description of Artificial Sequence: Synthetic polypeptide"

SEQ ID NO: 635 - protein, 125 aa, Artificial Sequence
  source: /note="Description of Artificial Sequence: Synthetic polypeptide"
QVQLVQSGAEVKKPGASVKVSCKASGYTFTSYWMNWVRQAPGQGLEWMGRIDPYDSETHYAQKLQGRVTMTTDTSTSTAYMELRSLRSDDTAVYYCARGGYDFDVGTLYWFFDVWGQGTTVTVSS

SEQ ID NO: 636 - protein, 9 aa, Artificial Sequence
  source: /note="Description of Artificial Sequence: Synthetic peptide"
YTFTSYWMN

SEQ ID NO: 637 - protein, 15 aa, Artificial Sequence
  source: /note="Description of Artificial Sequence: Synthetic peptide"
WMGRIDPYDSETHYA

SEQ ID NO: 638 - protein, 17 aa, Artificial Sequence
  source: /note="Description of Artificial Sequence: Synthetic peptide"
RGGYDFDVGTLYWFFDV

SEQ ID NO: 639 - protein, 107 aa, Artificial Sequence
  source: /note="Description of Artificial Sequence: Synthetic polypeptide"
DIQMTQSPSSLSASVGDRVTITCRASENIYSYLAWYQQKPGKAPKLLIYNAKTLAEGVPSRFSGSGSGTDFTLTISSLQPEDFATYYCQHHYGTPRTFGGGTKVEIK

SEQ ID NO: 640 - protein, 8 aa, Artificial Sequence
  source: /note="Description of Artificial Sequence: Synthetic peptide"
ENIYSYLA

SEQ ID NO: 641 - protein, 11 aa, Artificial Sequence
  source: /note="Description of Artificial Sequence: Synthetic peptide"
LLIYNAKTLAE

SEQ ID NO: 642 - protein, 8 aa, Artificial Sequence
  source: /note="Description of Artificial Sequence: Synthetic peptide"
QHHYGTPR

SEQ ID NO: 643 - protein, 125 aa, Artificial Sequence
  source: /note="Description of Artificial Sequence: Synthetic polypeptide"
QVQLVQSGAEVKKPGASVKVSCKASGYTFTSYWMNWVRQAPGQGLEWMGRIDPYDSETHYAQKLQGRVTMTTDTSTSTAYMELRSLRSDDTAVYYCARGGYDFDVDTLYWFFDVWGQGTTVTVSS

SEQ ID NO: 644 - protein, 107 aa, Artificial Sequence
  source: /note="Description of Artificial Sequence: Synthetic polypeptide"
DIQMTQSPSSLSASVGDRVTITCRASENIYSALAWYQQKPGKAPKLLIYNAKTLAEGVPSRFSGSGSGTDFTLTISSLQPEDFATYYCQHHAGTPRTFGGGTKVEIK

SEQ ID NO: 645 - protein, 121 aa, Artificial Sequence
  source: /note="Description of Artificial Sequence: Synthetic polypeptide"
QVQLVESGGGLVKPGGSLRLSCAASGFTFSSYGMHWVRQAPGKGLEWVAFIRYDGSNKYYADSVKGRFTISRDNSKNTLYLQMNSLRAEDTAVYYCAKDRGLGDGTYFDYWGQGTTVTVSS

SEQ ID NO: 646 - protein, 9 aa, Artificial Sequence
  source: /note="Description of Artificial Sequence: Synthetic peptide"
FTFSSYGMH

SEQ ID NO: 647 - protein, 14 aa, Artificial Sequence
  source: /note="Description of Artificial Sequence: Synthetic peptide"
WVAFIRYDGSNKYY

SEQ ID NO: 648 - protein, 13 aa, Artificial Sequence
  source: /note="Description of Artificial Sequence: Synthetic peptide"
KDRGLGDGTYFDY

SEQ ID NO: 649 - protein, 110 aa, Artificial Sequence
  source: /note="Description of Artificial Sequence: Synthetic polypeptide"
QSALTQPASVSGSPGQSITISCSGSSSNIGNNAVNWYQQLPGKAPKLLIYYDDLLPSGVSDRFSGSKSGTSAFLAISGLQSEDEADYYCAAWDDSLNGPVFGGGTKLTVL

SEQ ID NO: 650 - protein, 10 aa, Artificial Sequence
  source: /note="Description of Artificial Sequence: Synthetic peptide"
SSNIGNNAVN

SEQ ID NO: 651 - protein, 11 aa, Artificial Sequence
  source: /note="Description of Artificial Sequence: Synthetic peptide"
LLIYYDDLLPS

SEQ ID NO: 652 - protein, 10 aa, Artificial Sequence
  source: /note="Description of Artificial Sequence: Synthetic peptide"
AAWDDSLNGP

SEQ ID NO: 653 - protein, 121 aa, Artificial Sequence
  source: /note="Description of Artificial Sequence: Synthetic polypeptide"
QVQLVESGGGLVKPGGSLRLSCAASGFTFSSYGMHWVRQAPGKGLEWVAFIRYDGSNKYYADSVKGRFTISRDNSKNTLYLQMNSLRAEDTAVYYCAKDAGEGDGTYFDYWGQGTTVTVSS

SEQ ID NO: 654 - protein, 110 aa, Artificial Sequence
  source: /note="Description of Artificial Sequence: Synthetic polypeptide"
QSALTQPASVSGSPGQSITISCSGSSSNIGNNAVNWYQQLPGKAPKLLIYADDLLPSGVSDRFSGSKSGTSAFLAISGLQSEDEADYYCAAWDDSLNGPVFGGGTKLTVL

SEQ ID NO: 655 - protein, 123 aa, Artificial Sequence
  source: /note="Description of Artificial Sequence: Synthetic polypeptide"
EVQLQQSGPELVKPGASVKISCKASAFNFTSYYLHWVKQGPGQGLEWIGWIYPGSGDTKYNEKFKGKATLTADTSSSAANMKLSSLTSEDSAVYYCARNRIFDSYYVDSMDYWGQGTSVTVSS

SEQ ID NO: 656 - protein, 10 aa, Artificial Sequence
  source: /note="Description of Artificial Sequence: Synthetic peptide"
AFNFTSYYLH

SEQ ID NO: 657 - protein, 14 aa, Artificial Sequence
  source: /note="Description of Artificial Sequence: Synthetic peptide"
WIGWIYPGSGDTKY

SEQ ID NO: 658 - protein, 15 aa, Artificial Sequence
  source: /note="Description of Artificial Sequence: Synthetic peptide"
RNRIFDSYYVDSMDY

SEQ ID NO: 659 - protein, 111 aa, Artificial Sequence
  source: /note="Description of Artificial Sequence: Synthetic polypeptide"
DIVLTQSPASLAVSLGQRAIISCKASQSVSFAGSNLMHWYQQKPGQQPKLLIYRASNLEVGVPTRFSGSGSGTDFTLNIHPVDEDDAATYYCQQSREYPFTFGSGTKLEIK

SEQ ID NO: 660 - protein, 12 aa, Artificial Sequence
  source: /note="Description of Artificial Sequence: Synthetic peptide"
QSVSFAGSNLMH

SEQ ID NO: 661 - protein, 11 aa, Artificial Sequence
  source: /note="Description of Artificial Sequence: Synthetic peptide"
LLIYRASNLEV

SEQ ID NO: 662 - protein, 8 aa, Artificial Sequence
  source: /note="Description of Artificial Sequence: Synthetic peptide"
QQSREYPF

SEQ ID NO: 663 - protein, 122 aa, Artificial Sequence
  source: /note="Description of Artificial Sequence: Synthetic polypeptide"
EVKLLQSGGGLVQPGGSLKLSCAASGIDLSRYWMSWVRRAPGKGLEWIGEINPDSSTINYAPSLKDKFIISRDNAKNTLSLQMRKVRSEDTALYFCIRRRYYGSSYWYFDVWGTGTTVTVSS

SEQ ID NO: 664 - protein, 9 aa, Artificial Sequence
  source: /note="Description of Artificial Sequence: Synthetic peptide"
IDLSRYWMS

SEQ ID NO: 665 - protein, 15 aa, Artificial Sequence
  source: /note="Description of Artificial Sequence: Synthetic peptide"
WIGEINPDSSTINYA

SEQ ID NO: 666 - protein, 15 aa, Artificial Sequence
  source: /note="Description of Artificial Sequence: Synthetic peptide"
IRRRYYGSSYWYFDV

SEQ ID NO: 667 - protein, 112 aa, Artificial Sequence
  source: /note="Description of Artificial Sequence: Synthetic polypeptide"
DVLMTQTPLSLPVSLGDQASISCRSSQSIVHTNGNTYLEWYLQKPGQSPKLLIYRVFNRFSGVPDRFSGSGSGTEFTLKISRVEAEDLGVYYCFQGSHVPFTFGAGTKLELK

SEQ ID NO: 668 - protein, 13 aa, Artificial Sequence
  source: /note="Description of Artificial Sequence: Synthetic peptide"
QSIVHTNGNTYLE

SEQ ID NO: 669 - protein, 11 aa, Artificial Sequence
  source: /note="Description of Artificial Sequence: Synthetic peptide"
LLIYRVFNRFS

SEQ ID NO: 670 - protein, 8 aa, Artificial Sequence
  source: /note="Description of Artificial Sequence: Synthetic peptide"
FQGSHVPF

SEQ ID NO: 671 - protein, 122 aa, Artificial Sequence
  source: /note="Description of Artificial Sequence: Synthetic polypeptide"
QVQLQQPGAELVKPGASVKLSCKASGYTFTTYWIQWIKQRPGQGLEWIGEIDPSDIFTNYNQKFKGKATLTVDTSSSTAYMQLSSLTSEDSAVYYCARGVYDGYYVGYFDVWGTGTTVTVSS

SEQ ID NO: 672 - protein, 9 aa, Artificial Sequence
  source: /note="Description of Artificial Sequence: Synthetic peptide"
YTFTTYWIQ

SEQ ID NO: 673 - protein, 14 aa, Artificial Sequence
  source: /note="Description of Artificial Sequence: Synthetic peptide"
WIGEIDPSDIFTNY

SEQ ID NO: 674 - protein, 14 aa, Artificial Sequence
  source: /note="Description of Artificial Sequence: Synthetic peptide"
RGVYDGYYVGYFDV

SEQ ID NO: 675 - protein, 111 aa, Artificial Sequence
  source: /note="Description of Artificial Sequence: Synthetic polypeptide"
DIVLTQSPASLAMSLGKRATISCRASESVSIMGTNLINWYQQKLGQPPKLLIYHASNLETGVPARFSGSGSRTDFTLTIDPVEEDDVAVYYCLQGRKIPRTFGGGTKLEIK

SEQ ID NO: 676 - protein, 12 aa, Artificial Sequence
  source: /note="Description of Artificial Sequence: Synthetic peptide"
ESVSIMGTNLIN

SEQ ID NO: 677 - protein, 11 aa, Artificial Sequence
  source: /note="Description of Artificial Sequence: Synthetic peptide"
LLIYHASNLET

SEQ ID NO: 678 - protein, 8 aa, Artificial Sequence
  source: /note="Description of Artificial Sequence: Synthetic peptide"
LQGRKIPR

SEQ ID NO: 679 - protein, 120 aa, Artificial Sequence
  source: /note="Description of Artificial Sequence: Synthetic polypeptide"
QVQLKESGPGLVAPSQSLSITCTVSGFSLTSYAISWFRQPPGKGLECLGVIWTGGGTNYNSVFKSRLSIIKDNSKSQVFLKMNSLQTDDTARYYCARKGDEGYWGYFDVWGTGTTVTVSS

SEQ ID NO: 680 - protein, 9 aa, Artificial Sequence
  source: /note="Description of Artificial Sequence: Synthetic peptide"
FSLTSYAIS

SEQ ID NO: 681 - protein, 13 aa, Artificial Sequence
  source: /note="Description of Artificial Sequence: Synthetic peptide"
CLGVIWTGGGTNY

SEQ ID NO: 682 - protein, 14 aa, Artificial Sequence
  source: /note="Description of Artificial Sequence: Synthetic peptide"
ARKGDEGYWGYFDV

SEQ ID NO: 683 - protein, 107 aa, Artificial Sequence
  source: /note="Description of Artificial Sequence: Synthetic polypeptide"
DILLTQSPAILSVSPGERVSFSCRASQSIGTSIHWYQQRTNVSPRLLIKYASESISGIPSRFSGSGSGTDFTLSINNVESEDIADYYCQHSNRWPLTFGAGTKLELK

SEQ ID NO: 684 - protein, 8 aa, Artificial Sequence
  source: /note="Description of Artificial Sequence: Synthetic peptide"
QSIGTSIH

SEQ ID NO: 685 - protein, 11 aa, Artificial Sequence
  source: /note="Description of Artificial Sequence: Synthetic peptide"
LLIKYASESIS

SEQ ID NO: 686 - protein, 8 aa, Artificial Sequence
  source: /note="Description of Artificial Sequence: Synthetic peptide"
QHSNRWPL

SEQ ID NO: 687 - protein, 120 aa, Artificial Sequence
  source: /note="Description of Artificial Sequence: Synthetic polypeptide"
QVQLVQSGAEVKKPGESLKVSCKASGYTFTSYYMHWVRQAPGQGLEWMGIINPSGGSTSYAQKFQGRVTMTRDTSTSTVYMELSSLRSEDTAVYYCARGSAYYYDFADYWGQGTLVTVSS

SEQ ID NO: 688 - protein, 9 aa, Artificial Sequence
  source: /note="Description of Artificial Sequence: Synthetic peptide"
YTFTSYYMH

SEQ ID NO: 689 - protein, 15 aa, Artificial Sequence
  source: /note="Description of Artificial Sequence: Synthetic peptide"
WMGIINPSGGSTSYA

SEQ ID NO: 690 - protein, 12 aa, Artificial Sequence
  source: /note="Description of Artificial Sequence: Synthetic peptide"
RGSAYYYDFADY

SEQ ID NO: 691 - protein, 106 aa, Artificial Sequence
  source: /note="Description of Artificial Sequence: Synthetic polypeptide"
SYVLTQPSSVSVAPGQTATISCGGHNIGSKNVHWYQQRPGQSPVLVIYQDNKRPSGIPERFSGSNSGNTATLTISGTQAMDEADYYCQVWDNYSVLFGGGTKLTVL

SEQ ID NO: 692 - protein, 8 aa, Artificial Sequence
  source: /note="Description of Artificial Sequence: Synthetic peptide"
NIGSKNVH

SEQ ID NO: 693 - protein, 11 aa, Artificial Sequence
  source: /note="Description of Artificial Sequence: Synthetic peptide"
LVIYQDNKRPS

SEQ ID NO: 694 - protein, 8 aa, Artificial Sequence
  source: /note="Description of Artificial Sequence: Synthetic peptide"
QVWDNYSV

SEQ ID NO: 695 - protein, 27 aa, Artificial Sequence
  source: /note="Description of Artificial Sequence: Synthetic peptide"
QDGQEEMGGITQTPYKVSISGTTVILT

SEQ ID NO: 696 - protein, 29 aa, Artificial Sequence
  source: /note="Description of Artificial Sequence: Synthetic peptide"
TGLDGQEELGGITQTPYKVSISGTTVILT

SEQ ID NO: 697 - protein, 27 aa, Artificial Sequence
  source: /note="Description of Artificial Sequence: Synthetic peptide"
QDGTEKMGGITQTPYKVSISGTTVILT

SEQ ID NO: 698 - protein, 21 aa, Artificial Sequence
  source: /note="Description of Artificial Sequence: Synthetic peptide"
LSIDNEEEMKFLSIISPSSWI

SEQ ID NO: 699 - protein, 20 aa, Artificial Sequence
  source: /note="Description of Artificial Sequence: Synthetic peptide"
NAELNCAVLQVNRLKSAQCG

SEQ ID NO: 700 - protein, 40 aa, Artificial Sequence
  source: /note="Description of Artificial Sequence: Synthetic polypeptide"
LSIDNEEEMKFLSIISPSSWIGVFNCAVLQVNRLKSAQCG

SEQ ID NO: 701 - protein, 30 aa, Artificial Sequence
  source: /note="Description of Artificial Sequence: Synthetic polypeptide"
AFKHEIKDSDNAELNCAVLQVNRLKSAQCG

SEQ ID NO: 702 - protein, 15 aa, Artificial Sequence
  source: /note="Description of Artificial Sequence: Synthetic peptide"
ARHCGHSPEEWITYS

SEQ ID NO: 703 - protein, 40 aa, Artificial Sequence
  source: /note="Description of Artificial Sequence: Synthetic polypeptide"
LSIDNEEEMKFLSIISPSSWIGVFNSAVLQVNRLKSAQSG

SEQ ID NO: 704 - protein, 30 aa, Artificial Sequence
  source: /note="Description of Artificial Sequence: Synthetic polypeptide"
AFKHEIKDSDNAELNSAVLQVNRLKSAQSG

SEQ ID NO: 705 - protein, 23 aa, Artificial Sequence
  source: /note="Description of Artificial Sequence: Synthetic peptide"
NCYQFFDESKNWYESQASCMSQN

SEQ ID NO: 706 - protein, 18 aa, Artificial Sequence
  source: /note="Description of Artificial Sequence: Synthetic peptide"
LLKVYSKEDQDLLKLVKS

SEQ ID NO: 707 - protein, 36 aa, Artificial Sequence
  source: /note="Description of Artificial Sequence: Synthetic polypeptide"
NNCYQFFDESKNWYESQASCMSQNSTPNTYICMQRT

SEQ ID NO: 708 - protein, 49 aa, Artificial Sequence
  source: /note="Description of Artificial Sequence: Synthetic polypeptide"
KNWICYKNNCYQFFDESKNWYESQASCMSQNASLENCSTPNTYICMQRT

SEQ ID NO: 709 - protein, 3 aa, Artificial Sequence
  source: /note="Description of Artificial Sequence: Synthetic peptide"
GRK

SEQ ID NO: 710 - protein, 14 aa, Artificial Sequence
  source: /note="Description of Artificial Sequence: Synthetic peptide"
PLGLAGLSGRSDNH

SEQ ID NO: 711 - protein, 21 aa, Artificial Sequence
  source: /note="Description of Artificial Sequence: Synthetic peptide"
PLGLAGGSGRKGSLSGRSDNH

SEQ ID NO: 712 - protein, 18 aa, Artificial Sequence
  source: /note="Description of Artificial Sequence: Synthetic peptide"
PLGLAGGSGSLSGRSDNH

SEQ ID NO: 713 - protein, 20 aa, Artificial Sequence
  source: /note="Description of Artificial Sequence: Synthetic peptide"
PLGLAGGSGSGSLSGRSDNH

SEQ ID NO: 714 - protein, 25 aa, Artificial Sequence
  source: /note="Description of Artificial Sequence: Synthetic peptide"
PLGLAGGSGSGRKGSGSLSGRSDNH

SEQ ID NO: 715 - protein, 29 aa, Artificial Sequence
  source: /note="Description of Artificial Sequence: Synthetic peptide"
PLGLAGGSGSGSGRKGSGSGSLSGRSDNH

SEQ ID NO: 716 - protein, 20 aa, Artificial Sequence
  source: /note="Description of Artificial Sequence: Synthetic peptide"
  SITE (1)..(20): /note="This sequence may encompass 1-10 'Gly Ser' repeating units"
GSGSGSGSGSGSGSGSGSGS

SEQ ID NO: 717 - protein, 60 aa, Artificial Sequence
  source: /note="Description of Artificial Sequence: Synthetic polypeptide"
  SITE (1)..(20): /note="This region may encompass 1-10 'Gly Ser' repeating units"
  SITE (21)..(60): /note="This region may encompass 1-10 'Gly Gly Gly Ser' repeating units"
GSGSGSGSGSGSGSGSGSGSGGGSGGGSGGGSGGGSGGGSGGGSGGGSGGGSGGGSGGGS

SEQ ID NO: 718 - protein, 70 aa, Artificial Sequence
  source: /note="Description of Artificial Sequence: Synthetic polypeptide"
  SITE (1)..(20): /note="This region may encompass 1-10 'Gly Ser' repeating units"
  SITE (21)..(70): /note="This region may encompass 1-10 'Gly Gly Gly Gly Ser' repeating units"
GSGSGSGSGSGSGSGSGSGSGGGGSGGGGSGGGGSGGGGSGGGGSGGGGSGGGGSGGGGSGGGGSGGGGS

SEQ ID NO: 719 - protein, 30 aa, Artificial Sequence
  source: /note="Description of Artificial Sequence: Synthetic polypeptide"
  SITE (1)..(30): /note="This sequence may encompass 1-10 'Gly Gly Ser' repeating units"
GGSGGSGGSGGSGGSGGSGGSGGSGGSGGS

SEQ ID NO: 720 - protein, 70 aa, Artificial Sequence
  source: /note="Description of Artificial Sequence: Synthetic polypeptide"
  SITE (1)..(30): /note="This region may encompass 1-10 'Gly Gly Ser' repeating units"
  SITE (31)..(70): /note="This region may encompass 1-10 'Gly Gly Gly Ser' repeating units"
GGSGGSGGSGGSGGSGGSGGSGGSGGSGGSGGGSGGGSGGGSGGGSGGGSGGGSGGGSGGGSGGGSGGGS

SEQ ID NO: 721 - protein, 80 aa, Artificial Sequence
  source: /note="Description of Artificial Sequence: Synthetic polypeptide"
  SITE (1)..(30): /note="This region may encompass 1-10 'Gly Gly Ser' repeating units"
  SITE (31)..(80): /note="This region may encompass 1-10 'Gly Gly Gly Gly Ser' repeating units"
GGSGGSGGSGGSGGSGGSGGSGGSGGSGGSGGGGSGGGGSGGGGSGGGGSGGGGSGGGGSGGGGSGGGGSGGGGSGGGGS

SEQ ID NO: 722 - protein, 90 aa, Artificial Sequence
  source: /note="Description of Artificial Sequence: Synthetic polypeptide"
  SITE (1)..(40): /note="This region may encompass 1-10 'Gly Gly Gly Ser' repeating units"
  SITE (41)..(90): /note="This region may encompass 1-10 'Gly Gly Gly Gly Ser' repeating units"
GGGSGGGSGGGSGGGSGGGSGGGSGGGSGGGSGGGSGGGSGGGGSGGGGSGGGGSGGGGSGGGGSGGGGSGGGGSGGGGSGGGGSGGGGS

SEQ ID NO: 723 - protein, 50 aa, Artificial Sequence
  source: /note="Description of Artificial Sequence: Synthetic polypeptide"
  SITE (1)..(50): /note="This sequence may encompass 1-10 'Ser Gly Gly Gly Ser' repeating units"
SGGGSSGGGSSGGGSSGGGSSGGGSSGGGSSGGGSSGGGSSGGGSSGGGS

SEQ ID NO: 724 - protein, 50 aa, Artificial Sequence
  source: /note="Description of Artificial Sequence: Synthetic polypeptide"
  SITE (1)..(20): /note="This region may encompass 1-10 'Gly Ser' repeating units"
  SITE (21)..(50): /note="This region may encompass 1-10 'Gly Gly Ser' repeating units"
GSGSGSGSGSGSGSGSGSGSGGSGGSGGSGGSGGSGGSGGSGGSGGSGGS

SEQ ID NO: 725 - protein, 40 aa, Artificial Sequence
  source: /note="Description of Artificial Sequence: Synthetic polypeptide"
  SITE (1)..(40): /note="This sequence may encompass 1-10 'Gly Gly Gly Ser' repeating units"
GGGSGGGSGGGSGGGSGGGSGGGSGGGSGGGSGGGSGGGS

SEQ ID NO: 726 - protein, 50 aa, Artificial Sequence
  source: /note="Description of Artificial Sequence: Synthetic polypeptide"
  SITE (1)..(50): /note="This sequence may encompass 1-10 'Gly Gly Gly Gly Ser' repeating units"
GGGGSGGGGSGGGGSGGGGSGGGGSGGGGSGGGGSGGGGSGGGGSGGGGS

What is claimed is:

1-26. (canceled)

27. A precursor tri-specific antibody construct, comprising:
(a) a first binding domain that binds to a tumor associated antigen (TAA);
(b) a second binding domain that binds to a first natural killer (NK) cell surface antigen or a second binding domain comprising a cytokine receptor engager;
(c) a third binding domain that binds to a T cell surface antigen or a second NK cell surface antigen; and
(d) a regulatory domain comprising a protease cleavage domain, a half-life prolonging (HLP) domain, and a CAP component that reduces the ability of the third binding domain to bind to its target antigen.

28. The precursor tri-specific antibody construct of claim 27, wherein said second binding domain binds to the natural killer (NK) cell surface antigen NKG2A.

29. The precursor tri-specific antibody construct of claim 27, wherein the first binding domain and the second binding domain each comprises a single chain variable fragment (scFv), and the third binding domain comprises a Fab antigen binding fragment.

30. The precursor tri-specific antibody construct of claim 27, wherein the first binding domain binds to a TAA selected from EGFR, ROR1, PSMA, and 5T4, the second binding domain binds to the NK cell surface antigen NKG2A, and the third binding domain binds to T cell surface antigen CD3.

31. The precursor tri-specific antibody construct of claim 30, wherein the first binding domain binds to 5T4.

32. The precursor tri-specific antibody construct of claim 27, wherein the first binding domain comprises a scFv that binds to 5T4, the second binding domain is a scFv that binds to NKG2A, and the third binding domain is a Fab that binds to CD3.

33. The precursor tri-specific antibody construct of claim 31, wherein the first binding domain that binds to 5T4 comprises a variable heavy (VH) chain sequence set forth in SEQ ID NO: 623 and a variable light (VL) chain set forth in SEQ ID NO: 624; or comprises three complementarity determining regions (CDRs) on a heavy chain (HCDR1, HCDR2, and HCDR3) and three CDRs on a light chain (LCDR1, LCDR2, and LCDR3), wherein
(i) the HCDR1, HCDR2, and HCDR3 comprise the amino acid sequences of SEQ ID NOs:476-478, and the LCDR1, LCDR2, and LCDR3 comprise the amino acid sequences of SEQ ID NOs:480-482; or
(ii) the HCDR1, HCDR2, and HCDR3 comprise the amino acid sequences of SEQ ID NOs:484-486, and the LCDR1, LCDR2, and LCDR3 comprise the amino acid sequences of SEQ ID NOs:488-490; or
(iii) the HCDR1, HCDR2, and HCDR3 comprise the amino acid sequences of SEQ ID NOs:492-494, and the LCDR1, LCDR2, and LCDR3 comprise the amino acid sequences of SEQ ID NOs:496-498; or
(iv) the HCDR1, HCDR2, and HCDR3 comprise the amino acid sequences of SEQ ID NOs:500-502, and the LCDR1, LCDR2, and LCDR3 comprise the amino acid sequences of SEQ ID NOs:504-506; or
(v) the HCDR1, HCDR2, and HCDR3 comprise the amino acid sequences of SEQ ID NOs:508-510, and the LCDR1, LCDR2, and LCDR3 comprise the amino acid sequences of SEQ ID NOs:512-514; or
(vi) the HCDR1, HCDR2, and HCDR3 comprise the amino acid sequences of SEQ ID NOs:516-518, and the LCDR1, LCDR2, and LCDR3 comprise the amino acid sequences of SEQ ID NOs:520-522; or
(vii) the HCDR1, HCDR2, and HCDR3 comprise the amino acid sequences of SEQ ID NOs:524-526, and the LCDR1, LCDR2, and LCDR3 comprise the amino acid sequences of SEQ ID NOs:528-530; or
(viii) the HCDR1, HCDR2, and HCDR3 comprise the amino acid sequences of SEQ ID NOs:532-534, and the LCDR1, LCDR2, and LCDR3 comprise the amino acid sequences of SEQ ID NOs:536-538; or
(ix) the HCDR1, HCDR2, and HCDR3 comprise the amino acid sequences of SEQ ID NOs:540-542, and the LCDR1, LCDR2, and LCDR3 comprise the amino acid sequences of SEQ ID NOs:544-546.

34. The precursor tri-specific antibody construct of claim 28, wherein the second binding domain, that binds to NKG2A, comprises a VH chain sequence set forth in SEQ ID NO: 635 and a VL chain sequence set forth in SEQ ID NO: 639; or comprises three complementarity determining regions (CDRs) on a heavy chain (HCDR1, HCDR2, and HCDR3) and three CDRs on a light chain (LCDR1, LCDR2, and LCDR3), wherein the HCDR1, HCDR2, and HCDR3 comprise the amino acid sequences of SEQ ID NOs:636-638, and the LCDR1, LCDR2, and LCDR3 comprise the amino acid sequences of SEQ ID NOs:640-642.

35. The precursor tri-specific antibody construct of claim 27, wherein said antibody construct comprises polypeptide A and polypeptide B, said polypeptide A and polypeptide B comprise amino acid sequences having the sequences of SEQ ID NOs: 206 and 398.

36. The precursor tri-specific antibody construct of claim 35, wherein said antibody construct is IM1240.

37. A tri-specific antibody derived from the precursor tri-specific antibody construct of claim 27.

38. The tri-specific antibody of claim 37 comprising:
(e) a first binding domain that binds to a tumor associated antigen (TAA);
(f) a second binding domain that binds to the natural killer (NK) cell surface antigen NKG2A; and
(g) a third binding domain that binds to a T cell surface antigen or a second NK cell surface antigen.

39. The tri-specific antibody of claim 38, wherein the first binding domain is a scFv that binds to 5T4, the second binding domain is a scFv that binds to NKG2A, and the third binding domain is a Fab that binds to CD3.

40. The tri-specific antibody of claim 39, wherein said tri-specific antibody comprises polypeptide A and polypeptide B, said polypeptide A and polypeptide B comprise amino acid sequences having the sequences SEQ ID NOs: 180 and 177; or wherein said polypeptide A and polypeptide B comprise amino acid sequences having the sequences SEQ ID NOs: 180 and 392.

41. The tri-specific antibody of claim 40, wherein said tri-specific antibody is IM1222.

42. The precursor tri-specific antibody construct of claim 27, wherein said third binding domain comprises a Fab region comprising a heavy chain polypeptide and a light chain polypeptide, said heavy chain polypeptide comprises a heavy chain variable region and a heavy chain constant region (VH-CH), said light chain polypeptide comprises a light chain variable region and a light chain constant region (VL-CL), wherein
when said first binding domain is located C-terminally to said VL-CL region, said second binding domain is located C-terminally to said VH-CH region, or
when said first binding domain is located C-terminally to said VH-CH region, said second binding domain is located C-terminally to said VL-CL region.

43. The precursor tri-specific antibody construct of claim 27, wherein a single regulatory domain comprising a protease cleavage domain, a half-life prolonging (HLP) domain, and a CAP component is located N-terminally to said VH region or to said VL region of said third binding domain.

44. A pharmaceutical composition, comprising a precursor tri-specific antibody construct of claim 27, and a pharmaceutically acceptable carrier.

45. A pharmaceutical composition comprising the tri-specific antibody of claim 38.

46. A nucleic acid construct comprising one or more nucleic acid sequences, said sequences encoding a precursor tri-specific antibody construct of claim 27.

47. An expression vector comprising the nucleic acid construct of claim 46.

48. A nucleic acid construct comprising one or more nucleic acid sequences, said sequences encoding a tri-specific antibody of claim 38.

49. A method of treating, preventing, or delaying disease progression, reducing tumor load, or reducing the incidence of a cancer or a tumor, or any combination thereof, in a subject in need of such treatment, comprising a step of administering to the subject a pharmaceutical composition of claim 44.

50. The method of claim 49, wherein the cancer or tumor comprises a solid tumor or non-solid tumor, or the cancer or tumor comprises a metastasis of a cancer or tumor.

51. The method of claim 50, wherein the cancer or tumor expresses the TAA to which the first binding domain binds.

52. The method of claim 51, wherein the TAA is 5T4.
